(19) United States
(12) Patent Application Publication
(10) Pub. No.: US 2025/0059261 A1
(43) Pub. Date: Feb. 20, 2025

(54) MULTI-SPECIFIC ANTIGEN BINDING MOLECULES TARGETING HIV AND METHODS OF USE

(71) Applicant: Gilead Sciences, Inc., Foster City, CA (US)

(72) Inventors: Manuel Baca, Lexington, MA (US); Wade S. Blair, Poolesville, MD (US); Brian A. Carr, Foster City, CA (US); Sheila B. Clancy, Pacifica, CA (US); Joshua Goldsmith, San Francisco, CA (US); Magdeleine S. Hung, Mountain View, CA (US); Manu Kanwar, San Marcos, CA (US); Brian Moldt, Overijse (BE); Mark Nagel, San Mateo, CA (US); Craig S. Pace, Pacifica, CA (US); YenRu Pan, Oceanside, CA (US); Heather T. Stephenson, San Jose, CA (US); Nathan D. Thomsen, Castro Valley, CA (US)

(21) Appl. No.: 18/771,566

(22) Filed: Jul. 12, 2024

Related U.S. Application Data
(62) Division of application No. 17/409,260, filed on Aug. 23, 2021.
(60) Provisional application No. 63/163,713, filed on Mar. 19, 2021.
(60) Provisional application No. 63/070,141, filed on Aug. 25, 2020.

(51) Int. Cl. C07K 16/10; A61K 39/00; A61P 31/18; C07K 16/28

(52) U.S. Cl. CPC C07K 16/1063; A61P 31/18; C07K 16/2809; A61K 2039/505; C07K 2317/24; C07K 2317/31; C07K 2317/55; C07K 2317/622; C07K 2317/92; C07K 2317/94

(57) ABSTRACT

Provided are multi-specific antigen binding molecules, including bispecific antibodies, that bind to CD3 and an HIV antigen, including HIV envelope protein gp120. Also provided are methods of using such antigen binding molecules to treat or prevent HIV infection.

### CROSS-REFERENCE TO RELATED APPLICATIONS

[0001] This application is a Division of U.S. Nonprovisional application Ser. No. 17/409,260, filed on Aug. 23, 2021, which claims the benefit under 35 U.S.C. § 119(e) of U.S. Provisional Application No. 63/070,141, filed on Aug. 25, 2020 and U.S. Provisional Application No. 63/163,713, filed on Mar. 19, 2021, which are hereby incorporated herein by reference in their entireties for all purposes.

### FIELD

[0002] Provided are multi-specific antigen binding molecules and antigen binding fragments thereof for one or both of the treatment and the prevention of human immunodeficiency virus (HIV) infection.

### SEQUENCE LISTING

[0003] The instant application contains a Sequence Listing which has been submitted electronically in XML format and is hereby incorporated by reference in its entirety. Said XML copy, created on Oct. 30, 2024, is named 1337-US-DIV_SL.xml and is 1,502,533 bytes in size.

### BACKGROUND

[0004] Human immunodeficiency virus (HIV) infection and related diseases are a major public health problem worldwide. Most currently approved therapies for HIV infection target the viral reverse transcriptase, protease enzymes, and integrase. Yet resistance of HIV to these existing drugs, long-term toxicity, and lack of patient adherence to daily dosing regimens have been associated with these therapies. Therefore, it is important to discover and develop new anti-HIV antibodies with advantageous properties suitable for therapeutic uses.

[0005] WO 2005/058963; WO 2010/107939; WO 2012/030904; WO 2012/158948; WO 2013/090644; WO 2013/016468; WO 2013/192589; WO 2014/063059 and WO 2018/125813 describe human anti-HIV antibodies derived from memory B cells of HIV-infected donors, which are capable of inhibiting infection by HIV-1 species from a plurality of clades. The therapeutic use of the antibodies is limited due to their intra-patient viral coverage, pharmacokinetics, induction of anti-drug antibodies, off-target binding (i.e., polyspecificity), and other properties that interfere with efficient manufacturing and storage, however.

[0006] Multi-specific antigen binding molecules are single molecules that can bind at least two different antigens. Bispecific antigen binding molecules are single molecules that can bind two different antigens. This property can be leveraged in a number of ways to improve the efficacy and/or selectivity of biotherapeutics, for example, by neutralizing the activity of two disease mediators instead of one, enhancing selective binding to disease over normal tissue, generating novel functions (e.g. Factor VIII mimicry of Emicizumab) or by directly recruiting immune cells for targeted killing (e.g. Blinatumomab recruitment of CD3+ T-cells to kill CD19+ B-cells). As such, the field of bispecific antibodies is rapidly growing, with potential applications in nearly every therapeutic area. There are currently three approved bispecific products (Blinatumomab, Ebmicizumab and Catumaxomab) and more than 50 clinical trials underway (antibodysociety.org).

[0007] A large number of different bispecific antibody formats have been described, with many of these being used to develop therapeutic molecules (e.g., reviewed in Spiess and Carter, 2015, Mol. Immunol, 67: 95-106). Production of bispecific antibodies is typically more complex than that of conventional antibodies. For instance, generation of Fab-arm exchanged bispecifics such as the Genmab Duobody platform (Labrijn et. al., 2013, PNAS, 110: 5145-5150) requires separate production of each half-antibody (as an IgG), then mixing these together under special conditions that enables Fab arm exchange of the two half antibodies to generate the desired bispecific molecule. The need for separate cell lines to produce each half antibody (or parental unreacted reduced antibody) IgG, purification of these intermediates, and optimization of the Fab arm exchange reaction and process to purify the target bispecific away from residual half antibody IgG adds significant time and complexity to research and development.

[0008] Other bispecific format strategies, such as those that pair an scFv fusion protein with a Fab-Fc fusion protein (e.g., WO 2016/086196; WO 2016/071004), ensure that there is only a single light chain as a strategy to avoid Fab arm exchange. Challenges with bispecific formats that include an scFv arise because the scFv moiety oftentimes does not bind the target antigen with desired affinity, can have undesirable off-target binding, and can contribute to a bispecific molecule that does not express well, is difficult to purify and has insufficient serum half-life to allow efficacy for an intended indication.

### SUMMARY

[0009] In one aspect, provided is are multi-specific (e.g., bispecific) antigen binding molecules that binds to human CD3 and an HIV antigen. da

[0010] In some embodiments, the multi-specific (e.g., bispecific) antigen binding molecule comprises: (a) a first antigen binding domain that comprises a first heavy chain variable domain (VH) and a first light chain variable domain (VL), wherein the first antigen binding domain binds to CD3 and comprises: (i) a first VH-complementarity determining region (CDR) 1 comprising the amino acid sequence of TYAMN (SEQ ID NO:1); (ii) a first VH-CDR2 comprising the amino acid sequence of RIRSKYNNYATYYAX₁SVKX₂, wherein X1 is A or D and X₂ is G or S (SEQ ID NO:2); (iii) a first VH-CDR3 comprising the amino acid sequence of HGNFGX₃SYVSWFAY, wherein X₃ is H or N (SEQ ID NO:3); (iv) a first VL-CDR1 comprising the amino acid sequence of GSSTGAVTTGHYAN (SEQ ID NO: 4); (v) a first VL-CDR2 comprising the amino acid sequence of GTX₄X₅RAP, wherein X₄X₅ is SN or NK (SEQ ID NO:5); and (vi) a first VL-CDR3 comprising the amino acid sequence of ALWYSNX₆WV, wherein X₆ is L or R (SEQ ID NO:6), wherein the first VH-CDR1, the first VH-CDR2, the first VH-CDR3, the first VL-CDR1, the first VL-CDR2, and the first VH-CDR3 are according to Kabat; and (b) a second antigen binding domain that binds to an HIV antigen. In some embodiments, the multi-specific (e.g., bispecific) antigen binding molecule that binds to human CD3 and a second antigen, wherein the antigen binding molecule comprises: (a) a first antigen binding domain that comprises a first heavy chain variable domain (VH) and a first light chain variable domain (VL), wherein the first antigen binding domain binds to CD3 and comprises: (i) a first VH-complementarity determining region (CDR) 1 comprising the amino acid sequence of TYAMN (SEQ ID NO:1); (ii) a first VH-CDR2 comprising the amino acid sequence of RIRSKYNNYATYYAX₁SVKX₂, wherein X₁ is A or D and X₂ is G or S (SEQ ID NO:2); (iii) a first VH-CDR3 comprising the amino acid sequence of HGNFGX₃SYVSWFAY, wherein X₃ is H or N (SEQ ID NO:3); (iv) a first VL-CDR1 comprising the amino acid sequence of GSSTGAVTTGHYAN (SEQ ID NO: 4); (v) a first VL-CDR2 comprising the amino acid sequence of GTX₄X₅RAP, wherein X₄X₅ is SN or NK (SEQ ID NO:5); and (vi) a first VL-CDR3 comprising the amino acid sequence of ALWYSNX₆WV, wherein X₆ is L or R (SEQ ID NO:6), wherein the first VH-CDR1, the first VH-CDR2, the first VH-CDR3, the first VL-CDR1, the first VL-CDR2, and the first VH-CDR3 are according to Kabat; and (b) a second antigen binding domain that binds to a second antigen. In some embodiments (i) the first VH-complementarity determining region (CDR) 1 comprises the amino acid sequence of TYAMN (SEQ ID NO:1); (ii) the first VH-CDR2 comprises the amino acid sequence of RIRSKYNNYATYYADSVKX₂, wherein X₂ is G or S (SEQ ID NO:7); (iii) the first VH-CDR3 comprises the amino acid sequence of HGNFGHSYVSWFAY (SEQ ID NO:8); (iv) the first VL-CDR1 comprises the amino acid sequence of GSSTGAVTTGHYAN (SEQ ID NO: 4); (v) the first VL-CDR2 comprises the amino acid sequence of GTSNRAP (SEQ ID NO:9); and (vi) the first VL-CDR3 comprises the amino acid sequence of ALWYSNRWV (SEQ ID NO:10). In some embodiments, the first VH-CDR1, the first VH-CDR2, the first VH-CDR3, the first VL-CDR1, the first VL-CDR2 and the first VL-CDR3 comprise the following amino acid sequences, respectively (according to Kabat): (i) SEQ ID NOs: 1, 11, 8, 4, 5 and 10; (ii) SEQ ID NOs: 1, 11, 8, 4, 9 and 10; (iii) SEQ ID NOs: 1, 12, 8, 4, 9 and 10; (iv) SEQ ID NOs: 1, 13, 8, 4, 14 and 15; (v) SEQ ID NOs: 1, 13, 16, 4, 14 and 15; or (vi) SEQ ID NOs: 1, 11, 8, 4, 14 and 10. In some embodiments, the first VH-CDR1, the first VH-CDR2, the first VH-CDR3, the first VL-CDR1, the first VL-CDR2 and the first VL-CDR3 comprise the following amino acid sequences, respectively (according to Kabat): (i) SEQ ID NOs: 1, 11, 8, 4, 9 and 10; or (ii) SEQ ID NOs: 1, 12, 8, 4, 9 and 10. In some embodiments, the first VH-CDR1, the first VH-CDR2, the first VH-CDR3, the first VL-CDR1, the first VL-CDR2 and the first VL-CDR3 comprise the following amino acid sequences, respectively (according to Kabat): SEQ ID NOs: 1, 11, 8, 4, 9 and 10. In some embodiments, the first VH-CDR1, the first VH-CDR2, the first VH-CDR3, the first VL-CDR1, the first VL-CDR2 and the first VL-CDR3 comprise the following amino acid sequences, respectively (according to Kabat): SEQ ID NOs: 1, 12, 8, 4, 9 and 10.

[0011] In some embodiments, the multi-specific (e.g., bispecific) antigen binding molecule comprises: (a) a first antigen binding domain that comprises a first heavy chain variable domain (VH) and a first light chain variable domain (VL), wherein the first antigen binding domain binds to CD3 and comprises: (i) a first VH-CDR1 comprising the amino acid sequence of GFTFNTY (SEQ ID NO:17); (ii) a first VH-CDR2 comprising the amino acid sequence of SKYNNY (SEQ ID NO:18); (iii) a first VH-CDR3 comprising the amino acid sequence of GNFGX₃SYVSWFA, wherein X₃ is H or N (SEQ ID NO:19); (iv) a first VL-CDR1 comprising the amino acid sequence of SSTGAVTTGHY (SEQ ID NO: 20); (v) a first VL-CDR2 comprising the amino acid sequence of GTX₄, wherein X₄ is N or S (SEQ ID NO:21); and (vi) a first VL-CDR3 comprising the amino acid sequence of WYSNX₆W, wherein X₆ is L or R (SEQ ID NO:22), wherein the first VH-CDR1, the first VH-CDR2, the first VH-CDR3, the first VL-CDR1, the first VL-CDR2, and the first VH-CDR3 are according to Chothia; and (b) a second antigen binding domain that binds to an HIV antigen. In some embodiments, the multi-specific (e.g., bispecific) antigen binding molecule comprises: (a) a first antigen binding domain that comprises a first heavy chain variable domain (VH) and a first light chain variable domain (VL), wherein the first antigen binding domain binds to CD3 and comprises: (i) a first VH-CDR1 comprising the amino acid sequence of GFTFNTY (SEQ ID NO:17); (ii) a first VH-CDR2 comprising the amino acid sequence of SKYNNY (SEQ ID NO:18); (iii) a first VH-CDR3 comprising the amino acid sequence of GNFGX₃SYVSWFA, wherein X₃ is H or N (SEQ ID NO:19); (iv) a first VL-CDR1 comprising the amino acid sequence of SSTGAVTTGHY (SEQ ID NO: 20); (v) a first VL-CDR2 comprising the amino acid sequence of GTX₄, wherein X₄ is N or S (SEQ ID NO:21); and (vi) a first VL-CDR3 comprising the amino acid sequence of WYSNX₆W, wherein X₆ is L or R (SEQ ID NO:22), wherein the first VH-CDR1, the first VH-CDR2, the first VH-CDR3, the first VL-CDR1, the first VL-CDR2, and the first VH-CDR3 are according to Chothia; and (b) a second antigen binding domain that binds to a second antigen. In some embodiments, the first VH-CDR1, the first VH-CDR2, the first VH-CDR3, the first VL-CDR1, the first VL-CDR2 and the first VL-CDR3 comprise the following amino acid sequences, respectively (according to Chothia): (i) SEQ ID NOs: 17, 18, 23, 20, 21 and 25; (ii) SEQ ID NOs: 17, 18, 23, 20, 24 and 25; (iii) SEQ ID NOs: 17, 18, 23, 20, 26 and 27; (iv) SEQ ID NOs: 17, 18, 75, 20, 26 and 27; or (v) SEQ ID NOs: 17, 18, 23, 20, 26 and 25. In some embodiments, the first VH-CDR1, the first VH-CDR2, the first VH-CDR3, the first VL-CDR1, the first VL-CDR2 and the first VL-CDR3 comprise the following amino acid sequences, respectively (according to Chothia): SEQ ID NOs: 17, 18, 23, 20, 24 and 25.

[0012] In some embodiments, the multi-specific (e.g., bispecific) antigen binding molecule comprises: (a) a first antigen binding domain that comprises a first heavy chain variable domain (VH) and a first light chain variable domain (VL), wherein the first antigen binding domain binds to CD3 and comprises: (i) a first VH-CDR1 comprising the amino acid sequence of GFTFNTYA (SEQ ID NO:28); (ii) a first VH-CDR2 comprising the amino acid sequence of IRSKYNNYAT (SEQ ID NO:29); (iii) a first VH-CDR3 comprising the amino acid sequence of VRHGNFGX₃SYVSWFAY, wherein X₃ is H or N (SEQ ID NO:30); (iv) a first VL-CDR1 comprising the amino acid sequence of TGAVTTGHY (SEQ ID NO:31); (v) a first VL-CDR2 comprising the amino acid sequence of GTX₄, wherein X₄ is N or S (SEQ ID NO:21); and (vi) a first VL-CDR3 comprising the amino acid sequence of ALWYSNX₆WV, wherein X₆ is L or R (SEQ ID NO:6), wherein the first VH-CDR1, the first VH-CDR2, the first VH-CDR3, the first VL-CDR1, the first VL-CDR2, and the first VH-CDR3 are according to IMGT; and (b) a second antigen binding domain that binds to an HIV antigen. In some embodiments, the multi-specific (e.g., bispecific) antigen binding molecule comprises: (a) a first antigen binding domain that comprises a first heavy chain variable domain (VH) and a first light chain variable domain (VL), wherein the first antigen binding domain binds to CD3 and comprises: (i) a first VH-CDR1 comprising the amino acid sequence of GFTFNTYA (SEQ ID NO:28); (ii) a first VH-CDR2 comprising the amino acid sequence of IRSKYNNYAT (SEQ ID NO:29); (iii) a first VH-CDR3 comprising the amino acid sequence of VRHGNFGX₃SYVSWFAY, wherein X₃ is H or N (SEQ ID NO:30); (iv) a first VL-CDR1 comprising the amino acid sequence of TGAVTTGHY (SEQ ID NO:31); (v) a first VL-CDR2 comprising the amino acid sequence of GTX₄, wherein X₄ is N or S (SEQ ID NO:21); and (vi) a first VL-CDR3 comprising the amino acid sequence of ALWYSNX₆WV, wherein X₆ is L or R (SEQ ID NO:6), wherein the first VH-CDR1, the first VH-CDR2, the first VH-CDR3, the first VL-CDR1, the first VL-CDR2, and the first VH-CDR3 are according to IMGT; and (b) a second antigen binding domain that binds to a second antigen. In some embodiments, the first VH-CDR1, the first VH-CDR2, the first VH-CDR3, the first VL-CDR1, the first VL-CDR2 and the first VL-CDR3 comprise the following amino acid sequences, respectively (according to IMGT): (i) SEQ ID NOs: 28, 29, 32, 31, 21 and 10; (ii) SEQ ID NOs: 28, 29, 32, 31, 24 and 10; (iii) SEQ ID NOs: 28, 29, 32, 31, 26 and 15; (iv) SEQ ID NOs: 28, 29, 33, 31, 26 and 15; or (v) SEQ ID NOs: 28, 29, 32, 31, 26 and 10. In some embodiments, the first VH-CDR1, the first VH-CDR2, the first VH-CDR3, the first VL-CDR1, the first VL-CDR2 and the first VL-CDR3 comprise the following amino acid sequences, respectively (according to IMGT): SEQ ID NOs: 28, 29, 32, 31, 24 and 10.

[0013] In some embodiments, the multi-specific (e.g., bispecific) antigen binding molecule comprises: (a) a first antigen binding domain that comprises a first heavy chain variable domain (VH) and a first light chain variable domain (VL), wherein the first antigen binding domain binds to CD3 and comprises: (i) a first VH-CDR1 comprising the amino acid sequence of ASGFTFNTYA (SEQ ID NO:34); (ii) a first VH-CDR2 comprising the amino acid sequence of IRSKYNNYATYYAX₁SVKX₂R, wherein X₁ is A or D and X₂ is G or S (SEQ ID NO:35); (iii) a first VH-CDR3 comprising the amino acid sequence of HGNFGX₃SYVSWFA, X₃ is H or N (SEQ ID NO:36); (iv) a first VL-CDR1 comprising the amino acid sequence of SSTGAVTTGHY (SEQ ID NO: 37); (v) a first VL-CDR2 comprising the amino acid sequence of GTX₄NRAPX₇VPAR, wherein X₄ is N or S and X₇ is G or W (SEQ ID NO:38); and (vi) a first VL-CDR3 comprising the amino acid sequence of WYSNX₆W, wherein X₆ is L or R (SEQ ID NO:22), wherein the first VH-CDR1, the first VH-CDR2, the first VH-CDR3, the first VL-CDR1, the first VL-CDR2, and the first VH-CDR3 are according to Honegger; and (b) a second antigen binding domain that binds to an HIV antigen. In some embodiments, the multi-specific (e.g., bispecific) antigen binding molecule comprises: (a) a first antigen binding domain that comprises a first heavy chain variable domain (VH) and a first light chain variable domain (VL), wherein the first antigen binding domain binds to CD3 and comprises: (i) a first VH-CDR1 comprising the amino acid sequence of ASGFTFNTYA (SEQ ID NO:34); (ii) a first VH-CDR2 comprising the amino acid sequence of IRSKYNNYATYYAX₁SVKX₂R, wherein X₁ is A or D and X₂ is G or S (SEQ ID NO:35); (iii) a first VH-CDR3 comprising the amino acid sequence of HGNFGX₃SYVSWFA, X₃ is H or N (SEQ ID NO:36); (iv) a first VL-CDR1 comprising the amino acid sequence of SSTGAVTTGHY (SEQ ID NO: 37); (v) a first VL-CDR2 comprising the amino acid sequence of GTX₄NRAPX₇VPAR, wherein X₄ is N or S and X₇ is G or W (SEQ ID NO:38); and (vi) a first VL-CDR3 comprising the amino acid sequence of WYSNX₆W, wherein X₆ is L or R (SEQ ID NO:22), wherein the first VH-CDR1, the first VH-CDR2, the first VH-CDR3, the first VL-CDR1, the first VL-CDR2, and the first VH-CDR3 are according to Honegger; and (b) a second antigen binding domain that binds to a second antigen. In some embodiments, (i) the first VH-CDR1 comprises the amino acid sequence of ASGFTFNTYA (SEQ ID NO:34); (ii) the first VH-CDR2 comprises the amino acid sequence of IRSKYNNYATYYADSVKX₂R, wherein X₂ is G or S (SEQ ID NO:39); (iii) the first VH-CDR3 comprises the amino acid sequence of HGNFGHSYVSWFA (SEQ ID NO:40); (iv) the first VL-CDR1 comprises the amino acid sequence of SSTGAVTTGHY (SEQ ID NO: 37); (v) the first VL-CDR2 comprises the amino acid sequence of GTSNRAPGVPAR (SEQ ID NO:41); and (vi) the first VL-CDR3 comprises the amino acid sequence of WYSNRW (SEQ ID NO:25). In some embodiments, the first VH-CDR1, the first VH-CDR2, the first VH-CDR3, the first VL-CDR1, the first VL-CDR2 and the first VL-CDR3 comprise the following amino acid sequences, respectively (according to Honegger): (i) SEQ ID NOs: 34, 39, 40, 37, 41 and 25; (ii) SEQ ID NOs: 34, 42, 40, 37, 41 and 25; (iii) SEQ ID NOs: 34, 43, 40, 37, 41 and 25; (iv) SEQ ID NOs: 34, 44, 40, 37, 45 and 27; (v) SEQ ID NOs: 34, 44, 46, 37, 45 and 27; or (vi) SEQ ID NOs: 34, 42, 40, 37, 47 and 25. In some embodiments, the first VH-CDR1, the first VH-CDR2, the first VH-CDR3, the first VL-CDR1, the first VL-CDR2 and the first VL-CDR3 comprise the following amino acid sequences, respectively (according to Honegger): (i) SEQ ID NOs: 34, 42, 40, 37, 41 and 25; or (ii) SEQ ID NOs: 34, 43, 40, 37, 41 and 25. In some embodiments, the first VH-CDR1, the first VH-CDR2, the first VH-CDR3, the first VL-CDR1, the first VL-CDR2 and the first VL-CDR3 comprise the following amino acid sequences, respectively (according to Honegger): SEQ ID NOs: 34, 42, 40, 37, 41 and 25. In some embodiments, the first VH-CDR1, the first VH-CDR2, the first VH-CDR3, the first VL-CDR1, the first VL-CDR2 and the first VL-CDR3 comprise the following amino acid sequences, respectively (according to Honegger): SEQ ID NOs: 34, 42, 40, 37, 41 and 25. In some embodiments, the first VH-CDR1, the first VH-CDR2, the first VH-CDR3, the first VL-CDR1, the first VL-CDR2 and the first VL-CDR3 comprise the following amino acid sequences, respectively (according to Honegger): SEQ ID NOs: 34, 43, 40, 37, 41 and 25. In some embodiments, the first VH-CDR1, the first VH-CDR2, the first VH-CDR3, the first VL-CDR1, the first VL-CDR2 and the first VL-CDR3 comprise the following amino acid sequences, respectively (according to Honegger): SEQ ID NOs: 34, 43, 40, 37, 41 and 25.

[0014] With respect to further embodiments of the first antigen binding domain of the multi-specific (e.g., bispecific) antigen binding molecules targeting or binding to CD3, in some embodiments, the multi-specific (e.g., bispecific) antigen binding molecule comprises one or more of the following amino acid substitutions (numbering according to Kabat): position 81 of the first VH is Q or E; position 83 of the first VH is K or R; position 89 of the first VH is M or V; position 100 of the first VH is H; position 57 of the first VL is G or W; and/or position 75 of the first VL is I or L. In some embodiments, the multi-specific (e.g., bispecific) antigen binding molecule comprises: one or more of the following amino acid substitutions (numbering according to Kabat): (i) position 81 of the first VH is Q or E; (ii) position 83 of the first VH is R; (iii) position 89 of the first VH is V; (iv) position 100 of the first VH is H; (v) position 57 of the first VL is G; and/or (vi) position 75 of the first VL is I. In some embodiments, position 81 of the first VH (numbering according to Kabat) is E. In some embodiments, position 81 of the first VH (numbering according to Kabat) is Q. In some embodiments, position 100 of the first VH (numbering according to Kabat) is H. In some embodiments, the first VH comprises an amino acid sequence selected from the group consisting of SEQ ID NOs: 48-53, or comprises an amino acid sequence that is at least 80%, at least 85%, at least 90%, at least 91%, at least 92%, at least 93%, at least 94%, at least 95%, at least 96%, at least 97%, at least 98%, or at least 99% identical to an amino acid sequence selected from the group consisting of SEQ ID NOs: 48-53. In some embodiments, the first VH comprises an amino acid sequence that is at least 80%, at least 85%, at least 90%, at least 91%, at least 92%, at least 93%, at least 94%, at least 95%, at least 96%, at least 97%, at least 98%, or at least 99% identical to the amino acid sequence of SEQ ID NO: 50. In some embodiments, the first VH comprises the amino acid sequence of SEQ ID NO: 50. In some embodiments, the first VH comprises an amino acid sequence that is at least 80%, at least 85%, at least 90%, at least 91%, at least 92%, at least 93%, at least 94%, at least 95%, at least 96%, at least 97%, at least 98%, or at least 99% identical to the amino acid sequence of SEQ ID NO: 51. In some embodiments, the first VH comprises the amino acid sequence of SEQ ID NO: 51. In some embodiments, the first VL comprises an amino acid sequence selected from the group consisting of SEQ ID NOs: 54-58, or comprises an amino acid sequence that is at least 80%, at least 85%, at least 90%, at least 91%, at least 92%, at least 93%, at least 94%, at least 95%, at least 96%, at least 97%, at least 98%, or at least 99% identical to an amino acid sequence selected from the group consisting of SEQ ID NOs: 54-58. In some embodiments, the first VL comprises an amino acid sequence that is at least 80%, at least 85%, at least 90%, at least 91%, at least 92%, at least 93%, at least 94%, at least 95%, at least 96%, at least 97%, at least 98%, or at least 99% identical to the amino acid sequence of SEQ ID NO: 56. In some embodiments, the first VL comprises the amino acid sequence of SEQ ID NO: 56. In some embodiments, the first VH comprises an amino acid sequence selected from the group consisting of SEQ ID NOs: 48-53, or comprises an amino acid sequence that is at least 80%, at least 85%, at least 90%, at least 91%, at least 92%, at least 93%, at least 94%, at least 95%, at least 96%, at least 97%, at least 98%, or at least 99% identical to an amino acid sequence selected from the group consisting of SEQ ID NOs: 48-53 and wherein the first VL comprises an amino acid sequence selected from the group consisting of SEQ ID NOs: 54-58, or comprises an amino acid sequence that is at least 80%, at least 85%, at least 90%, at least 91%, at least 92%, at least 93%, at least 94%, at least 95%, at least 96%, at least 97%, at least 98%, or at least 99% identical to an amino acid sequence selected from the group consisting of SEQ ID NOs: 54-58. In some embodiments, the first VH and the first VL comprise the amino acid sequences set forth, respectively, or comprise amino acid sequences that are at least 80%, at least 85%, at least 90%, at least 91%, at least 92%, at least 93%, at least 94%, at least 95%, at least 96%, at least 97%, at least 98%, or at least 99% identical to the amino acid sequences set forth, respectively: SEQ ID NOs: 48 and 54; SEQ ID NOs: 49 and 55; SEQ ID NOs: 50 and 55; SEQ ID NOs: 50 and 56; SEQ ID NOs: 51 and 55; SEQ ID NOs: 51 and 56; SEQ ID NOs: 52 and 56; SEQ ID NOs: 53 and 57; or SEQ ID NOs: 50 and 58. In some embodiments, the first VH and the first VL comprise the amino acid sequences set forth, respectively, or comprise amino acid sequences that are at least 80%, at least 85%, at least 90%, at least 91%, at least 92%, at least 93%, at least 94%, at least 95%, at least 96%, at least 97%, at least 98%, or at least 99% identical to the amino acid sequences set forth, respectively: SEQ ID NOs: 49 and 55; SEQ ID NOs: 50 and 55; SEQ ID NOs: 50 and 56; SEQ ID NOs: 51 and 55; or SEQ ID NOs: 51 and 56. In some embodiments, the first VH and the first VL comprise the amino acid sequences set forth, respectively, or comprise amino acid sequences that are at least 80%, at least 85%, at least 90%, at least 91%, at least 92%, at least 93%, at least 94%, at least 95%, at least 96%, at least 97%, at least 98%, or at least 99% identical to the amino acid sequences set forth, respectively: SEQ ID NOs: 50 and 56. In some embodiments, the first VH and the first VL comprise the amino acid sequences set forth, respectively, or comprise amino acid sequences that are at least 80%, at least 85%, at least 90%, at least 91%, at least 92%, at least 93%, at least 94%, at least 95%, at least 96%, at least 97%, at least 98%, or at least 99% identical to the amino acid sequences set forth, respectively: SEQ ID NOs: 51 and 56. In some embodiments, at least one of the first antigen binding domain and the second antigen binding domain independently comprise a Fab, an F(ab)2, Fv, a scFv, a sc(Fv)2, or a diabody. In some embodiments, the first antigen binding domain comprises a scFv and the second antigen binding domain comprises a Fab. In some embodiments, the first antigen binding domain comprises a scFv and the second antigen binding domain comprises a Fab, wherein the first VH and the first VL comprise the amino acid sequences set forth, respectively: SEQ ID NOs: 50 and 56. In some embodiments, the first antigen binding domain comprises a Fab and the second antigen binding domain comprises a scFv. In some embodiments, the first antigen binding domain comprises a Fab and the second antigen binding domain comprises a Fab. In some embodiments, the first antigen binding domain comprises a scFv and the second antigen binding domain comprises a scFv. In some embodiments, the first antigen binding domain comprises a Fab and the second antigen binding domain comprises an extracellular domain of CD4. In some embodiments, the first antigen binding domain comprises a Fab and the second antigen binding domain comprises an extracellular domain of CD4, wherein the first VH and the first VL comprise the amino acid sequences set forth, respectively: SEQ ID NOs: 51 and 56. In some embodiments, the first antigen binding domain comprises a scFv and the second antigen binding domain comprises an extracellular domain of CD4. In some embodiments, the first antigen binding domain is a scFv comprising a cysteine (C) at position 44 in the scFv variable heavy domain; and a cysteine (C) at position 100 in the scFv variable light domain. In some embodiments, the first antigen binding domain is a scFv comprising a VH and a VL, the scFv comprising an amino acid sequence selected from SEQ ID NOs: 59-66, or comprising an amino acid sequence that is at least 80%, at least 85%, at least 90%, at least 91%, at least 92%, at least 93%, at least 94%, at least 95%, at least 96%, at least 97%, at least 98%, or at least 99% identical to an amino acid sequence selected from SEQ ID NOs: 59-66. In some embodiments, the first antigen binding domain is a scFv comprising a VH and a VL, the scFv comprising an amino acid sequence selected from SEQ ID NOs: 59-63, or comprising an amino acid sequence that is at least 80%, at least 85%, at least 90%, at least 91%, at least 92%, at least 93%, at least 94%, at least 95%, at least 96%, at least 97%, at least 98%, or at least 99% identical to an amino acid sequence selected from SEQ ID NOs: 59-63. In some embodiments, the first antigen binding domain is a scFv comprising a VH and a VL, the scFv comprising an amino acid sequence selected from SEQ ID NOs: 62-63, or comprising an amino acid sequence that is at least 80%, at least 85%, at least 90%, at least 91%, at least 92%, at least 93%, at least 94%, at least 95%, at least 96%, at least 97%, at least 98%, or at least 99% identical to an amino acid sequence selected from SEQ ID NOs: 62-63.

[0015] With respect to further embodiments of the second antigen binding domain of the multi-specific (e.g., bispecific) antigen binding molecules targeting or binding to an HIV antigen, in some embodiments, the second antigen binding domain binds to an HIV envelope protein selected from the group consisting of gp120 and gp41. In some embodiments, the second antigen binding domain competes with or comprises VH and VL variable domains of a broadly neutralizing antibody (bNAb) that binds to an HIV antigen. In some embodiments, the second antigen binding domain binds to an epitope or region of gp120 selected from the group consisting of: third variable loop (V3) (e.g., high mannose patch) comprising a N332 oligomannose glycan; second variable loop (V2) (e.g., Env trimer apex); CD4 binding site (CD4bs); gp120/gp41 interface; or silent face of gp120. In some embodiments, the second antigen binding domain binds to an epitope or region of gp120 in the third variable loop (V3) (e.g., high mannose patch) comprising a N332 oligomannose glycan and competes with or comprises VH and VL regions from an antibody selected from the group consisting of GS-9722 (elipovimab), GS-2872, PGT-121, PGT-121.66, PGT-121.414, PGT-122, PGT-123, PGT-124, PGT-125, PGT-126, PGT-128, PGT-130, PGT-133, PGT-134, PGT-135, PGT-136, PGT-137, PGT-138, PGT-139, 10-1074, 10-1074-J, VRC24, 2G12, BG18, 354BG8, 354BG18, 354BG42, 354BG33, 354BG129, 354BG188, 354BG411, 354BG426, DH270.1, DH270.6, PGDM12, VRC41.01, PGDM21, PCDN-33A, BF520.1 and VRC29.03. In some embodiments, the second antigen binding domain binds to an epitope or region of gp120 in the second variable loop (V2) (e.g., Env trimer apex) and competes with or comprises VH and VL regions from an antibody selected from the group consisting of PG9, PG16, PGC14, PGG14, PGT-142, PGT-143, PGT-144, PGT-145, CH01, CH59, PGDM1400, CAP256, CAP256-VRC26.08, CAP256-VRC26.09, CAP256-VRC26.25, PCT64-24E and VRC38.01. In some embodiments, the second antigen binding domain binds to an epitope or region of gp120 in the CD4 binding site (CD4bs) and competes with or comprises VH and VL regions from an antibody selected from the group consisting of 3BNC117, GS-9723, GS-5423, 3BNC60, b12, F105, VRC01, VRC07, VRC07-523, VRC03, VRC06, VRC06b01 VRC08, VRC0801, NIH45-46, PGV04 (a.k.a., VRC-PG04); CH103, 44-VRC13.01, 1NC9, 12A12, N6, 1-18, N49-P7, NC-Cow1, IOMA, CH235 and CH235.12, N49P6, N49P7, N49P11, N49P9 and N60P25. In some embodiments, the second antigen binding domain binds to an epitope or region of gp120 in the CD4 binding site (CD4bs) and comprises one or more extracellular (EC) domains of CD4. In some embodiments, the one or more EC domains of CD4 comprise a sequence as set forth below, or a sequence that is at least 80%, at least 85%, at least 90%, at least 91%, at least 92%, at least 93%, at least 94%, at least 95%, at least 96%, at least 97%, at least 98%, or at least 99% identical to a sequence selected from the group consisting of:

(i)
(SEQ ID NO: 746)
KKVVYGKKGDTVELTCTASQKKNIQFHWKNSNQIKILGNQGSFLTKGPSK
LNDRVDSRRSLWDQGNFPLIIKNLKPEDSDTYICEVEDQKEEVQLVVVG;
(ii)
(SEQ ID NO: 747)
KKVVYGKKGDTVELTCTASQKKNIQFHWKNSNQIKILGNQGSFLTKGPSK
LNDRVDSRRSLWDQGNFPLIIKNLKPEDSDTYICEVEDQKEEVQLVVVGG
GGSGKKVVYGKKGDTVELTCTASQKKNIQFHWKNSNQIKILGNQGSFLTK
GPSKLNDRVDSRRSLWDQGNFPLIIKNLKPEDSDTYICEVEDQKEEVQLV
VVG;
(iii)
(SEQ ID NO: 748)
KKVVLGKKGDTVELTCTASQKKSIQFHWKNSNQIKILGNQGSFLTKGPSK
LNDRADSRRSLWDQGNFPLIIKNLKIEDSDTYICEVEDQKEEVQLLVFG;
or
(iv)
(SEQ ID NO: 749)
KKVVLGKKGDTVELTCTASQKKSIQFHWKNSNQIKILGNQGSFLTKGPSK
LNDRADSRRSLWDQGNFPLIIKNLKIEDSDTYICEVEDQKEEVQLLVFGG
GGSGKKVVLGKKGDTVELTCTASQKKSIQFHWKNSNQIKILGNQGSFLTK
GPSKLNDRADSRRSLWDQGNFPLIIKNLKIEDSDTYICEVEDQKEEVQLL
VFG.

In some embodiments, the EC domain of CD4 comprises a sequence that is at least 80%, at least 85%, at least 90%, at least 91%, at least 92%, at least 93%, at least 94%, at least 95%, at least 96%, at least 97%, at least 98%, or at least 99% identical to the sequence of SEQ ID NO: 746. In some embodiments, the EC domain of CD4 comprises a sequence that is at least 95% identical to the sequence of SEQ ID NO: 746. In some embodiments, the EC domain of CD4 comprises a sequence that is at least 99% identical to the sequence of SEQ ID NO: 746. In some embodiments, the EC domain of CD4 comprises the sequence of SEQ ID NO: 746. In some embodiments, the second antigen binding domain binds to an epitope or region of gp120 in the gp120/gp41 interface and competes with or comprises VH and VL regions from an antibody selected from the group consisting of PGT-151, CAP248-2B, 35022, 8ANC195, ACS202, VRC34 and VRC34.01. In some embodiments, the second antigen binding domain binds to an epitope or region of the gp120 silent face and competes with or comprises VH and VL regions from an antibody selected from VRC-PG05 and SF12. In some embodiments, the second antigen binding domain binds to an epitope or region of gp41 in the membrane proximal region (MPER). In some embodiments, the second antigen binding domain binds to an epitope or region of gp41 in the membrane proximal region (MPER) and competes with or comprises VH and VL regions from an antibody selected from the group consisting of 10E8, 10E8v4, 10E8-5R-100cF, 4E10, DH511.11P, 2F5, 7b2, and LN01. In some embodiments, the second antigen binding domain binds to an epitope or region of the gp41 fusion peptide and competes with or comprises VH and VL regions from an antibody selected from the group consisting of VRC34 and ACS202. In some embodiments, the second antigen binding domain comprises a second VH comprising a second VH-CDR1, a second VH-CDR2, and a second VH-CDR3; and a second VL comprising a second VL-CDR1, a second VL-CDR2, and a second VH-CDR3; comprising the amino acid sequences (according to Kabat) set forth, respectively, in: SEQ ID NOs: 76, 77, 78, 79, 80 and 81; SEQ ID NOs: 76, 82, 78, 79, 80 and 81; SEQ ID NOs: 83, 84, 85, 86, 80 and 87; SEQ ID NOs: 83, 88, 85, 86, 80 and 87; SEQ ID NOs: 90, 91, 92, 93, 94 and 95; SEQ ID NOs: 90, 91, 96, 93, 94 and 95; SEQ ID NOs: 97, 98, 99, 100, 101 and 102; SEQ ID NOs: 103, 104, 105, 106, 94 and 107; SEQ ID NOs: 108, 109, 110, 111, 112 and 113; SEQ ID NOs: 114, 115, 116, 117, 118 and 119; SEQ ID NOs: 114, 120, 121, 122, 118 and 123; SEQ ID NOs: 124, 125, 126, 127, 128 and 113; SEQ ID NOs: 129, 115, 131, 127, 118 and 113; SEQ ID NOs: 132, 133, 134, 135, 136 and 137; SEQ ID NOs: 138, 139, 140, 141, 142 and 143; SEQ ID NOs: 144, 145, 146, 147, 148 and 143; SEQ ID NOs: 149, 150, 151, 152, 153 and 143; SEQ ID NOs: 154, 155, 156, 157, 158 and 159; SEQ ID NOs: 160, 161, 162, 163, 164 and 165; SEQ ID NOs: 166, 161, 167, 163, 164 and 165; SEQ ID NOs: 168, 169, 170, 171, 172 and 173; SEQ ID NOs: 168, 174, 170, 171, 172 and 173; SEQ ID NOs: 175, 176, 177, 171, 172 and 173; SEQ ID NOs: 178, 179, 180, 181, 182 and 183; SEQ ID NOs: 184, 185, 186, 187, 188 and 189; SEQ ID NOs: 190, 191, 192, 193, 194 and 195; SEQ ID NOs: 196, 197, 198, 199, 200 and 201; SEQ ID NOs: 202, 203, 204, 205, 206 and 207; SEQ ID NOs: 208, 209, 210, 211, 212 and 213; SEQ ID NOs: 214, 215, 216, 217, 218 and 219; SEQ ID NOs: 214, 220, 216, 221, 218 and 219; SEQ ID NOs: 214, 220, 222, 221, 218 and 219; SEQ ID NOs: 223, 224, 225, 226, 227 and 228; SEQ ID NOs: 229, 230, 231, 232, 233 and 234; SEQ ID NOs: 902, 903, 904, 905, 906 and 907; SEQ ID NOs: 908, 909, 910, 911, 912 and 913; SEQ ID NOs: 914, 915, 916, 917, 918 and 919; or SEQ ID NOs: 920, 921, 922, 923, 924 and 925. In some embodiments, the second antigen binding domain comprises a second VH comprising a second VH-CDR1, a second VH-CDR2, and a second VH-CDR3; and a second VL comprising a second VL-CDR1, a second VL-CDR2, and a second VH-CDR3; comprising the amino acid sequences (according to Chothia) set forth, respectively, in: SEQ ID NOs: 235, 236, 237, 238, 239 and 240; SEQ ID NOs: 241, 242, 243, 244, 239 and 245; SEQ ID NOs: 246, 242, 247, 244, 239 and 245; SEQ ID NOs: 248, 249, 250, 251, 239 and 252; SEQ ID NOs: 248, 249, 253, 251, 239 and 252; SEQ ID NOs: 254, 255, 256, 257, 258 and 259; SEQ ID NOs: 260, 261, 262, 263, 239 and 264; SEQ ID NOs: 265, 266, 267, 268, 269 and 270; SEQ ID NOs: 271, 272, 273, 274, 275 and 270; SEQ ID NOs: 271, 276, 277, 278, 275 and 279; SEQ ID NOs: 280, 281, 282, 283, 284 and 270; SEQ ID NOs: 285, 272, 286, 283, 275 and 270; SEQ ID NOs: 287, 288, 289, 290, 291 and 292; SEQ ID NOs: 293, 294, 295, 296, 297 and 298; SEQ ID NOs: 299, 300, 301, 302, 303 and 298; SEQ ID NOs: 304, 300, 305, 406, 307 and 298; SEQ ID NOs: 308, 309, 310, 311, 312 and 313; SEQ ID NOs: 314, 315, 316, 317, 318 and 165; SEQ ID NOs: 320, 315, 321, 317, 318 and 165; SEQ ID NOs: 322, 323, 324, 325, 326 and 327; SEQ ID NOs: 322, 328, 324, 325, 326 and 327; SEQ ID NOs: 329, 323, 330, 325, 326 and 327; SEQ ID NOs: 331, 332, 333, 334, 335 and 336; SEQ ID NOs: 337, 338, 339, 340, 341 and 342; SEQ ID NOs: 343, 344, 345, 346, 341 and 347; SEQ ID NOs:348, 349, 350, 351, 352 and 353; SEQ ID NOs: 354, 355, 356, 357, 358 and 359; SEQ ID NOs: 360, 361, 362, 363, 364 and 365; SEQ ID NOs: 366, 367, 368, 369, 370 and 371; SEQ ID NOs: 366, 361, 368, 369, 370 and 371; SEQ ID NOs: 372, 361, 373, 369, 370 and 371; SEQ ID NOs: 374, 375, 376, 377, 378 and 379; SEQ ID NOs: 380, 381, 382, 383, 384 and 385; SEQ ID NOs: 926, 927, 928, 929, 930 and 931; SEQ ID NOs: 932, 933, 934, 935, 936 and 937; SEQ ID NOs: 938, 939, 940, 941, 942 and 943; or SEQ ID NOs: 944, 945, 946, 947, 948 and 949. In some embodiments, the second antigen binding domain comprises a second VH comprising a second VH-CDR1, a second VH-CDR2, and a second VH-CDR3; and a second VL comprising a second VL-CDR1, a second VL-CDR2, and a second VH-CDR3; comprising the amino acid sequences (according to IMGT) set forth, respectively, in: SEQ ID NOs: 386, 387, 388, 389, 239 and 81; SEQ ID NOs: 390, 391, 392, 393, 239 and 87; SEQ ID NOs: 390, 391, 394, 393, 239 and 87; SEQ ID NOs: 395, 396, 397, 393, 239 and 87; SEQ ID NOs: 398, 399, 400, 401, 239 and 95; SEQ ID NOs: 398, 399, 402, 401, 239 and 95; SEQ ID NOs: 403, 404, 405, 406, 258 and 102; SEQ ID NOs: 407, 408, 409, 410, 239 and 107; SEQ ID NOs: 411, 412, 413, 414, 269 and 113; SEQ ID NOs: 415, 416, 417, 418, 275 and 119; SEQ ID NOs: 415, 419, 420, 421, 275 and 123; SEQ ID NOs: 422, 423, 424, 425, 275 and 113; SEQ ID NOs: 426, 416, 427, 425, 275 and 113; SEQ ID NOs: 428, 429, 430, 431, 291 and 137; SEQ ID NOs: 432, 433, 434, 435, 297 and 143; SEQ ID NOs: 436, 437, 438, 439, 303 and 143; SEQ ID NOs: 440, 437, 441, 442, 307 and 143; SEQ ID NOs: 443, 444, 445, 446, 312 and 159; SEQ ID NOs: 447, 448, 449, 450, 318 and 165; SEQ ID NOs: 451, 448, 452, 450, 318 and 165; SEQ ID NOs: 453, 454, 455, 456, 326 and 173; SEQ ID NOs: 453, 457, 455, 456, 326 and 173; SEQ ID NOs: 458, 459, 460, 456, 326 and 173; SEQ ID NOs: 461, 462, 463, 464, 335 and 183; SEQ ID NOs: 465, 466, 467, 468, 341 and 189; SEQ ID NOs: 469, 470, 471, 472, 341 and 195; SEQ ID NOs: 473, 474, 475, 476, 352 and 201; SEQ ID NOs: 477, 478, 479, 480, 358 and 207; SEQ ID NOs: 481, 482, 483, 484, 364 and 213; SEQ ID NOs: 485, 486, 487, 488, 370 and 219; SEQ ID NOs: 485, 482, 487, 488, 370 and 219; SEQ ID NOs: 489, 482, 490, 488, 370 and 219; SEQ ID NOs: 491, 492, 493, 494, 378 and 228; SEQ ID NOs: 495, 496, 497, 498, 384 and 234; SEQ ID NOs: 950, 951, 952, 953, 930 and 907; SEQ ID NOs: 954, 955, 956, 957, 936 and 913; SEQ ID NOs: 958, 959, 960, 961, 942 and 919; or SEQ ID NOs: 962, 963, 964, 965, 948 and 925. In some embodiments, the second antigen binding domain comprises a second VH comprising a second VH-CDR1, a second VH-CDR2, and a second VH-CDR3; and a second VL comprising a second VL-CDR1, a second VL-CDR2, and a second VH-CDR3; comprising the amino acid sequences (according to Honegger) set forth, respectively, in: SEQ ID NOs: 499, 500, 501, 238, 502 and 240; SEQ ID NOs: 499, 503, 501, 238, 502 and 240; SEQ ID NOs: 505, 506, 507, 244, 502 and 245; SEQ ID NOs: 508, 509, 510, 244, 502 and 245; SEQ ID NOs: 511, 512, 513, 251, 514 and 252; SEQ ID NOs: 511, 512, 515, 251, 514 and 252; SEQ ID NOs: 516, 517, 518, 257, 519 and 259; SEQ ID NOs: 520, 521, 522, 264, 523 and 264; SEQ ID NOs: 524, 525, 526, 268, 527 and 270; SEQ ID NOs: 528, 529, 530, 274, 531 and 270; SEQ ID NOs: 528, 532, 533, 278, 531 and 279; SEQ ID NOs: 534, 535, 536, 283, 537 and 270; SEQ ID NOs: 1090, 529, 538, 283, 531 and 270; SEQ ID NOs: 539, 540, 541, 290, 542 and 292; SEQ ID NOs: 543, 544, 545, 546, 547 and 298; SEQ ID NOs: 548, 549, 550, 1091, 551 and 298; SEQ ID NOs: 552, 553, 554, 555, 556 and 298; SEQ ID NOs: 557, 558, 559, 311, 560 and 313; SEQ ID NOs: 561, 562, 563, 564, 565 and 165; SEQ ID NOs: 566, 562, 1092, 564, 567 and 165; SEQ ID NOs: 568, 569, 570, 571, 572 and 327; SEQ ID NOs: 568, 573, 570, 571, 572 and 327; SEQ ID NOs: 574, 575, 576, 571, 572 and 327; SEQ ID NOs: 577, 578, 579, 580, 581 and 336; SEQ ID NOs: 582, 583, 584, 340, 585 and 342; SEQ ID NOs: 586, 587, 588, 346, 589 and 347; SEQ ID NOs: 590, 591, 592, 351, 593 and 353; SEQ ID NOs: 594, 595, 596, 597, 598 and 359; SEQ ID NOs: 599, 600, 601, 602, 603 and 365; SEQ ID NOs: 604, 605, 606, 607, 608 and 371; SEQ ID NOs: 604, 609, 606, 607, 608 and 371; SEQ ID NOs: 610, 609, 611, 607, 608 and 371; SEQ ID NOs: 612, 613, 614, 615, 616 and 379; SEQ ID NOs: 617, 618, 619, 620, 621 and 385; SEQ ID NOs: 966, 967, 968, 969, 970 and 931; SEQ ID NOs: 971, 972, 973, 974, 975 and 937; SEQ ID NOs: 976, 977, 978, 941, 979 and 943; or SEQ ID NOs: 980, 981, 982, 983, 984 and 949. In some embodiments, the second VH and the second VL comprise the amino acid sequences set forth, respectively, or comprise amino acid sequences that are at least 80%, at least 85%, at least 90%, at least 91%, at least 92%, at least 93%, at least 94%, at least 95%, at least 96%, at least 97%, at least 98%, or at least 99% identical to the amino acid sequences set forth, respectively: SEQ ID NOs: 622 and 623; SEQ ID NOs: 624 and 625; SEQ ID NOs: 624 and 626; SEQ ID NOs: 627 and 628; SEQ ID NOs: 629 and 630; SEQ ID NOs: 631 and 632; SEQ ID NOs: 633 and 634; SEQ ID NOs: 635 and 636; SEQ ID NOs: 637 and 638; SEQ ID NOs: 639 and 640; SEQ ID NOs: 641 and 642; SEQ ID NOs: 643 and 644; SEQ ID NOs: 645 and 646; SEQ ID NOs: 647 and 648; SEQ ID NOs: 649 and 650; SEQ ID NOs: 651 and 652; SEQ ID NOs: 653 and 654; SEQ ID NOs: 655 and 656; SEQ ID NOs: 657 and 658; SEQ ID NOs: 659 and 660; SEQ ID NOs: 661 and 662; SEQ ID NOs: 663 and 664; SEQ ID NOs: 665 and 666; SEQ ID NOs: 667 and 668; SEQ ID NOs: 669 and 670; SEQ ID NOs:671 and 672; SEQ ID NOs:673 and 670; SEQ ID NOs: 674 and 675; SEQ ID NOs: 676 and 677; SEQ ID NOs: 678 and 679; SEQ ID NOs: 680 and 681; SEQ ID NOs: 682 and 683; SEQ ID NOs: 684 and 685; SEQ ID NOs: 686 and 687; SEQ ID NOs: 688 and 689; SEQ ID NOs: 690 and 691; SEQ ID NOs: 692 and 693; SEQ ID NOs: 694 and 695; SEQ ID NOs: 985 and 986; SEQ ID NOs: 987 and 988; SEQ ID NOs: 989 and 990; or SEQ ID NOs: 991 and 992. In some embodiments, the second VH and the second VL comprise amino acid sequences that are at least 80%, at least 85%, at least 90%, at least 91%, at least 92%, at least 93%, at least 94%, at least 95%, at least 96%, at least 97%, at least 98%, or at least 99% identical to the amino acid sequences set forth, respectively, and comprising the following amino acids at the indicated positions (position numbering according to Kabat): (i) SEQ ID NOs: 622, 624 or 627, comprising one or more of: Ser-Ser-Val (SSV) or Thr-Gly-Val (TGV) at positions 82a-82c, Gln (Q) at position 39, Asn (N) at position 60, His (H) at position 68, any one of Lys (K), His (H) or Thr (T) at position 105, Len (L) at position 2, Ala (A) at position 32, and Ala (A) at position 95; and SEQ ID NOs: 623, 625, 626 or 628, comprising one or more of: Gly (G) at position 67, Tyr (Y), Phe (F) or Thr (T) at position 67a, Arg (R) at position 67b, Pro (P) at position 67c, and Lys (K) at position 103; or (ii) SEQ ID NOs: 663, 665 or 667, comprising one or more of: His (H) at position 3, Ser (S) or Val (V) at position 5, Glu (E) at position 10, Lys (K) at position 12, Lys (K) at position 23, Asn (N) at position 28, Arg (R) at position 30, Tyr (Y) at position 32, Thr (T) at position 68, Met (M) at position 69, Gln (Q) or His (H) at position 72, Tyr (Y), Phe (F) at position 74a, Phe (F) or Ser (S) at position 76, Ser (S) at position 77, Ala (A) at position 78, Ser (S) at position 82a, Arg (R) at position 82b, Val (V) at position 82c, Ile (I) or Thr (T) at position 89, Phe (F) at position 98, Tyr (Y) or Gly (G) at position 99, Gln (Q) at position 105, Met (M) at position 108, Phe-Asp-Phe-Asp (FDFD) (SEQ ID NO: 1040) at positions 74a, 74b, 74c, and 74d and Trp-Asp-Phe-Asp (WDFD) (SEQ ID NO: 1042) at positions 74a, 74b, 74c, and 74d; and SEQ ID NOs: 664, 666 or 668, comprising one or more of Arg (R) at position 14, Arg (R) at position 18, Ala (A) at position 19, Lys (L) at position 39, Pro (P) at position 40, Thr (T) at position 56, Ala (A) at position 60, Ser (S) at position 65, Thr (T) or His (H) at position 72, Lys (K) at position 74, Ser (S) at position 76, Ser (S) at position 77, Val (V) at position 83, Ile (I) or Phe (F) at position 98, Thr (T) or Gly (G) at position 99, Asn (N) at position 103, and Ile (I) at position 106. In some embodiments, the second VH and the second VL comprise amino acid sequences that are at least 80%, at least 85%, at least 90%, at least 91%, at least 92%, at least 93%, at least 94%, at least 95%, at least 96%, at least 97%, at least 98%, or at least 99% identical to the amino acid sequences set forth, respectively, and comprising the following amino acids at the indicated positions (position numbering according to Kabat): (i) SEQ ID NOs: 622, 624 or 627, comprising one or more of: Thr-Gly-Val (TGV) at positions 82a-82c, Asn (N) at position 60, His (H) at position 68, any one of Lys (K), His (H) and Thr (T) at position 105; and SEQ ID NOs: 623, 625, 626 or 628, comprising one or more of: Gly (G) at position 67, Tyr (Y), Phe (F) or Thr (T) at position 67a, Arg (R) at position 67b, Pro (P) at position 67c; or (ii) SEQ ID NOs: 663, 665 or 667, comprising Phe (F) at position 74a; and SEQ ID NOs: 664, 666 or 668, comprising Ala (A) at position 19.

[0016] With respect to the first and second Fc regions or domains of the multi-specific antigen binding molecules some embodiments, the multi-specific (e.g., bispecific) antigen binding molecules comprise a heterodimeric human IgG1 or IgG4, comprising a first Fc region and a second Fc region. In some embodiments, the first Fc region and the second Fc region are derived from IgG1m17. In some embodiments, the multi-specific (e.g., bispecific) antigen binding molecules comprise a heterodimeric human IgG1 or IgG4, comprising a first Fc region and a second Fc region, wherein one or both of the first and second Fc regions comprise one or more of the following amino acids at the indicated positions (EU numbering): alanine at position 234, alanine at position 235; and serine at position 331. In some embodiments, the multi-specific (e.g., bispecific) antigen binding molecules comprise a heterodimeric human IgG1, comprising a first Fc region and a second Fc region, wherein both of the first and second Fc regions comprise one or more of the following amino acids at the indicated positions (EU numbering): alanine at position 234, alanine at position 235; and serine at position 331. In some embodiments, the multi-specific (e.g., bispecific) antigen binding molecules comprise a heterodimeric human IgG1, comprising a first Fc region and a second Fc region, wherein both of the first and second Fc regions comprise the following amino acids at the indicated positions (EU numbering): alanine at position 234, alanine at position 235; and serine at position 331. In some embodiments, the multi-specific (e.g., bispecific) antigen binding molecules comprise a heterodimeric human IgG1 or IgG4, comprising a first Fc region and a second Fc region, wherein one or both of the first and second Fc regions comprise the following amino acids at the indicated positions (EU numbering): tyrosine at position 252, threonine at position 254 and glutamic acid at position 256 (YTE); or leucine at position 428 and serine at position 434 (LS). In some embodiments, the multi-specific (e.g., bispecific) antigen binding molecules comprise a heterodimeric human IgG1, comprising a first Fc region and a second Fc region, wherein one of the first and second Fc regions comprise the following amino acids at the indicated positions (EU numbering): tyrosine at position 252, threonine at position 254 and glutamic acid at position 256 (YTE). In some embodiments, the multi-specific (e.g., bispecific) antigen binding molecules comprise a heterodimeric human IgG1, comprising a first Fc region and a second Fc region, wherein the second Fc region comprises the following amino acids at the indicated positions (EU numbering): tyrosine at position 252, threonine at position 254 and glutamic acid at position 256 (YTE). In some embodiments, the multi-specific (e.g., bispecific) antigen binding molecules comprise a heterodimeric human IgG1 or IgG4, comprising a first Fc region and a second Fc region, comprising the following amino acids at the indicated positions (EU numbering): the first Fc region comprises a tryptophan at position 366 (T366W); and the second Fc region comprises a serine at position 366 (T366S), an alanine at position 368 (L368A) and a valine at position 407 (Y407V); the first Fc region comprises a serine at position 366 (T366S), an alanine at position 368 (L368A) and a valine at position 407 (Y407V); and the second Fc region comprises a tryptophan at position 366 (T366W); the first Fc region comprises a cysteine at position 354 (S354C), a tryptophan at position 366 (T366W); and the second Fc region comprises a cysteine at position 349 (Y349C), a serine at position 366 (T366S), an alanine at position 368 (L368A) and a valine at position 407 (Y407V); the first Fc region comprises cysteine at position 349 (Y349C), a serine at position 366 (T366S), an alanine at position 368 (L368A) and a valine at position 407 (Y407V); and the second Fc region comprises a cysteine at position 354 (S354C), a tryptophan at position 366 (T366W). In some embodiments, the multi-specific (e.g., bispecific) antigen binding molecules comprise a heterodimeric human IgG1, comprising a first Fc region and a second Fc region, comprising the following amino acids at the indicated positions (EU numbering): the first Fc region comprises a tryptophan at position 366 (T366W); and the second Fc region comprises a serine at position 366 (T366S), an alanine at position 368 (L368A) and a valine at position 407 (Y407V); or the first Fc region comprises a serine at position 366 (T366S), an alanine at position 368 (L368A) and a valine at position 407 (Y407V); and the second Fc region comprises a tryptophan at position 366 (T366W). In some embodiments, the multi-specific (e.g., bispecific) antigen binding molecules comprise a heterodimeric human IgG1, comprising a first Fc region and a second Fc region, comprising the following amino acids at the indicated positions (EU numbering): the first Fc region comprises a serine at position 366 (T366S), an alanine at position 368 (L368A) and a valine at position 407 (Y407V); and the second Fc region comprises a tryptophan at position 366 (T366W). In some embodiments, the multi-specific (e.g., bispecific) antigen binding molecules comprise a heterodimeric human IgG1 or IgG4, comprising a first hinge region and a second hinge region, wherein one or both of the first and second hinge regions comprise a serine at position 220 (C220S) (EU numbering). In some embodiments, the multi-specific (e.g., bispecific) antigen binding molecules comprise a heterodimeric human IgG1 or IgG4, comprising a first Fc region and a second Fc region, wherein one of the first Fc region or the second Fc region comprise the following amino acids at the indicated positions (EU numbering): arginine at position 435 (H435R); or arginine at position 435 (H435R) and phenylalanine at position 436 (Y436F). In some embodiments, the multi-specific (e.g., bispecific) antigen binding molecules comprise a heterodimeric human IgG1, comprising a first Fc region and a second Fc region, wherein one of the first Fc region or the second Fc region comprise the following amino acids at the indicated positions (EU numbering): arginine at position 435 (H435R). In some embodiments, the multi-specific (e.g., bispecific) antigen binding molecules comprise a heterodimeric human IgG1, comprising a first Fc region and a second Fc region, wherein the first Fc region comprises arginine at position 435 (H435R). In some embodiments, the multi-specific (e.g., bispecific) antigen binding molecules comprise a heterodimeric human IgG1 or IgG4, comprising a first Fc region and a second Fc region, comprising the following amino acids at the indicated positions (EU numbering): the first Fc region comprises an alanine at position 234 (L234A), an alanine at position 235 (L235A), a serine at position 331 (P331S) and a tryptophan at position 366 (T366W); and the second Fc region comprises an alanine a position 234 (L234A), an alanine at position 235 (L235A), a serine at position 331 (P331S), a serine at position 366 (T366S), an alanine at position 368 (L368A), a valine at position 407 (Y407V), and an arginine at position 435 (H435R); the first Fc region comprises an alanine at position 234 (L234A), an alanine at position 235 (L235A), a serine at position 331 (P331S) and a tryptophan at position 366 (T366W); and the second Fc region comprises an alanine a position 234 (L2 L234A 34), an alanine at position 235 (L235A), a serine at position 331 (P331S), a serine at position 366 (T366S), an alanine at position 368 (L368A), a valine at position 407 (Y407V), an arginine at position 435 (H435R) and a phenylalanine at position 436 (Y436F); the first Fc region comprises an alanine at position 234 (L234A), an alanine at position 235 (L235A), a serine at position 331 (P331S), a serine at position 366 (T366S), an alanine at position 368 (L368A), and a valine at position 407 (Y407V); and the second Fc region comprises an alanine at position 234 (L234A), an alanine at position 235 (L235A), a serine at position 331 (P331S) and a tryptophan at position 366 (T366W); the first Fc region comprises an alanine at position 234 (L234A), an alanine at position 235 (L235A), a serine at position 331 (P331S), a tryptophan at position 366 (T366W), a leucine at position 428 (M428L) and a serine at position 434 (N434S); and the second Fc region comprises an alanine a position 234 (L234A), an alanine at position 235 (L235A), a serine at position 331 (P331S), a serine at position 366 (T366S), an alanine at position 368 (L368A), a valine at position 407 (Y407V), and an arginine at position 435 (H435R); or the first Fc region comprises an alanine at position 234 (L234A), an alanine at position 235 (L235A), a serine at position 331 (P331S), a tryptophan at position 366 (T366W), a tyrosine at position 252 (M252Y), a threonine at position 254 (S254T) and a glutamic acid at position 256 (T256E); and the second Fc region comprises an alanine a position 234 (L234A), an alanine at position 235 (L235A), a serine at position 331 (P331S), a serine at position 366 (T366S), an alanine at position 368 (L368A), a valine at position 407 (Y407V), and an arginine at position 435 (H435R). In some embodiments, the multi-specific (e.g., bispecific) antigen binding molecules comprise a heterodimeric human IgG1, comprising a first Fc region and a second Fc region, comprising the following amino acids at the indicated positions (EU numbering): the first Fc region comprises an alanine a position 234 (L234A), an alanine at position 235 (L235A), a serine at position 331 (P331S), a serine at position 366 (T366S), an alanine at position 368 (L368A), a valine at position 407 (Y407V), and an arginine at position 435 (H435R); and the second Fc region comprises an alanine at position 234 (L234A), an alanine at position 235 (L235A), a serine at position 331 (P331S), a tryptophan at position 366 (T366W), a tyrosine at position 252 (M252Y), a threonine at position 254 (S254T) and a glutamic acid at position 256 (T256E). In some embodiments, the multi-specific (e.g., bispecific) antigen binding molecules comprise a heterodimeric human IgG1, comprising a first Fc region and a second Fc region, comprising amino acid sequences set forth, respectively, or comprising amino acid sequences that are at least 80%, at least 85%, at least 90%, at least 91%, at least 92%, at least 93%, at least 94%, at least 95%, at least 96%, at least 97%, at least 98%, or at least 99% identical to the amino acid sequences set forth, respectively: SEQ ID NOs.: 696 and 697; SEQ ID NOs.: 697 and 696; SEQ ID NOs.: 696 and 698; SEQ ID NOs.: 698 and 696; SEQ ID NOs.: 699 and 700; SEQ ID NOs.: 700 and 699; SEQ ID NOs.: 701 and 698; SEQ ID NOs.: 698 and 701; SEQ ID NOs.: 702 and 703; SEQ ID NOs.: 703 and 702; SEQ ID NOs.: 704 and 698; SEQ ID NOs.: 698 and 704; SEQ ID NOs.: 705 and 703; SEQ ID NOs.: 703 and 705; SEQ ID NOs.: 706 and 704; SEQ ID NOs.: 704 and 706; SEQ ID NOs.: 707 and 703; SEQ ID NOs.: 703 and 707; SEQ ID NOs.: 708 and 704; SEQ ID NOs.: 704 and 708; SEQ ID NOs.: 709 and 710; or SEQ ID NOs.: 710 and 709. In some embodiments, the multi-specific (e.g., bispecific) antigen binding molecules comprise a heterodimeric human IgG1, comprising a first Fc region and a second Fc region, comprising amino acid sequences that are at least 80%, at least 85%, at least 90%, at least 91%, at least 92%, at least 93%, at least 94%, at least 95%, at least 96%, at least 97%, at least 98%, or at least 99% identical to the amino acid sequences set forth, respectively: SEQ ID NOs.: 703 and 705. In some embodiments, the multi-specific (e.g., bispecific) antigen binding molecules comprise a heterodimeric human IgG1, comprising a first Fc region and a second Fc region, comprising amino acid sequences that are at least 95% identical to the amino acid sequences set forth, respectively: SEQ ID NOs.: 703 and 705. In some embodiments, the multi-specific (e.g., bispecific) antigen binding molecules comprise a heterodimeric human IgG1, comprising a first Fc region and a second Fc region, comprising amino acid sequences that are at least 99% identical to the amino acid sequences set forth, respectively: SEQ ID NOs.: 703 and 705. In some embodiments, the multi-specific (e.g., bispecific) antigen binding molecules comprise a heterodimeric human IgG1, comprising a first Fc region and a second Fc region, comprising amino acid sequences set forth, respectively: SEQ ID NOs.: 703 and 705.

[0017] With respect to further embodiments of the multi-specific (e.g., bispecific) antigen binding molecules, in some embodiments, the first antigen binding domain is a scFv that binds to CD3 and the second antigen binding domain is a Fab that binds to HIV gp120, wherein the first antigen binding domain comprises a first heavy chain (HC), and the second antigen binding domain comprises a second HC and a light chain (LC), the first HC, the second HC and the LC comprising the amino acid sequences set forth, respectively, or comprising amino acid sequences that are at least 80%, at least 85%, at least 90%, at least 91%, at least 92%, at least 93%, at least 94%, at least 95%, at least 96%, at least 97%, at least 98%, or at least 99% identical to the amino acid sequences set forth, respectively: SEQ ID NOs: 800, 801 and 802; SEQ ID NOs: 800, 803 and 802; SEQ ID NOs: 804, 803 and 802; SEQ ID NOs: 804, 805 and 802; SEQ ID NOs: 806, 801 and 802; SEQ ID NOs: 806, 803 and 802; SEQ ID NOs: 807, 803 and 802; SEQ ID NOs: 807, 805 and 802; SEQ ID NOs: 808, 809 and 802; SEQ ID NOs: 808, 810 and 802; SEQ ID NOs: 811, 801 and 802; SEQ ID NOs: 812, 809 and 802; SEQ ID NOs: 812, 810 and 802; SEQ ID NOs: 813, 805 and 802; SEQ ID NOs: 812, 814 and 802; SEQ ID NOs: 815, 801 and 802; SEQ ID NOs: 816, 805 and 802; SEQ ID NOs: 817, 801 and 802; SEQ ID NOs: 818, 805 and 802; SEQ ID NOs: 819, 810 and 802; SEQ ID NOs: 820, 810 and 802; SEQ ID NOs: 821, 822 and 823; SEQ ID NOs: 824, 825 and 823; SEQ ID NOs: 826, 825 and 823; SEQ ID NOs: 826, 827 and 823; SEQ ID NOs: 828, 829 and 823; SEQ ID NOs: 830, 822 and 823; SEQ ID NOs: 830, 825 and 823; SEQ ID NOs: 831, 825 and 823; SEQ ID NOs: 831, 827 and 823; SEQ ID NOs: 832, 833 and 823; SEQ ID NOs: 832, 829 and 823; SEQ ID NOs: 834, 827 and 823; SEQ ID NOs: 835, 829 and 823; SEQ ID NOs: 836, 829 and 823; SEQ ID NOs: 837, 833 and 823; SEQ ID NOs: 837, 838 and 823; SEQ ID NOs: 839, 840 and 823; SEQ ID NOs: 841, 829 and 823; SEQ ID NOs: 842, 829 and 823; SEQ ID NOs: 843, 829 and 823; SEQ ID NOs: 844, 829 and 823; SEQ ID NOs: 845, 829 and 823; SEQ ID NOs: 846, 829 and 823; SEQ ID NOs: 846, 833 and 823; SEQ ID NOs: 846, 838 and 823; SEQ ID NOs: 847, 827 and 823; SEQ ID NOs: 848, 829 and 823; SEQ ID NOs: 849, 829 and 823; SEQ ID NOs: 850, 829 and 823; SEQ ID NOs: 851, 829 and 823; SEQ ID NOs: 852, 829 and 823; SEQ ID NOs: 853, 829 and 823; SEQ ID NOs: 854, 829 and 823; SEQ ID NOs: 855, 829 and 823; SEQ ID NOs: 856, 829 and 823; SEQ ID NOs: 857, 829 and 823; SEQ ID NOs: 858, 829 and 823; SEQ ID NOs: 859, 829 and 823; SEQ ID NOs: 860, 829 and 823; SEQ ID NOs: 861, 862 and 863; SEQ ID NOs: 861, 864 and 863; SEQ ID NOs: 865, 864 and 863; SEQ ID NOs: 865, 866 and 863; SEQ ID NOs: 867, 868 and 863; SEQ ID NOs: 869, 862 and 863; SEQ ID NOs: 869, 864 and 863; SEQ ID NOs: 870, 864 and 863; SEQ ID NOs: 870, 866 and 863; SEQ ID NOs: 871, 872 and 863; SEQ ID NOs: 871, 868 and 863; SEQ ID NOs: 873, 862 and 863; SEQ ID NOs: 874, 866 and 863; SEQ ID NOs: 875, 872 and 863; SEQ ID NOs: 875, 868 and 863; SEQ ID NOs: 875, 876 and 863; SEQ ID NOs: 877, 862 and 863; SEQ ID NOs: 878, 866 and 863; SEQ ID NOs: 879, 862 and 863; SEQ ID NOs: 880, 866 and 863; SEQ ID NOs: 881, 882 and 883; SEQ ID NOs: 881, 884 and 883; SEQ ID NOs: 885, 884 and 883; SEQ ID NOs: 885, 886 and 883; SEQ ID NOs: 887, 888 and 883; SEQ ID NOs: 889, 882 and 883; SEQ ID NOs: 889, 884 and 883; SEQ ID NOs: 890, 884 and 883; SEQ ID NOs: 890, 886 and 883; SEQ ID NOs: 891, 892 and 883; SEQ ID NOs: 891, 888 and 883; SEQ ID NOs: 893, 882 and 883; SEQ ID NOs: 894, 886 and 883; SEQ ID NOs: 895, 892 and 883; SEQ ID NOs: 895, 888 and 883; SEQ ID NOs: 895, 896 and 883; SEQ ID NOs: 897, 882 and 883; SEQ ID NOs: 898, 886 and 883; SEQ ID NOs: 899, 882 and 883; or SEQ ID NOs: 900, 886 and 883. In some embodiments, the first antigen binding domain is a scFv that binds to CD3 and the second antigen binding domain is a Fab that binds to HIV gp120, wherein the first antigen binding domain comprises a first heavy chain (HC), and the second antigen binding domain comprises a second HC and a light chain (LC), the first HC, the second HC and the LC comprising the amino acid sequences set forth, respectively, or comprising amino acid sequences that are at least 80%, at least 85%, at least 90%, at least 91%, at least 92%, at least 93%, at least 94%, at least 95%, at least 96%, at least 97%, at least 98%, or at least 99% identical to the amino acid sequences set forth, respectively: SEQ ID NOs: 800, 801 and 802; SEQ ID NOs: 800, 803 and 802; SEQ ID NOs: 804, 803 and 802; SEQ ID NOs: 804, 805 and 802; SEQ ID NOs: 806, 801 and 802; SEQ ID NOs: 806, 803 and 802; SEQ ID NOs: 807, 803 and 802; SEQ ID NOs: 807, 805 and 802; SEQ ID NOs: 808, 809 and 802; SEQ ID NOs: 808, 810 and 802; SEQ ID NOs: 821, 822 and 823; SEQ ID NOs: 824, 825 and 823; SEQ ID NOs: 826, 825 and 823; SEQ ID NOs: 826, 827 and 823; SEQ ID NOs: 828, 829 and 823; SEQ ID NOs: 830, 822 and 823; SEQ ID NOs: 830, 825 and 823; SEQ ID NOs: 831, 825 and 823; SEQ ID NOs: 831, 827 and 823; SEQ ID NOs: 832, 833 and 823; SEQ ID NOs: 832, 829 and 823; SEQ ID NOs: 861, 862 and 863; SEQ ID NOs: 861, 864 and 863; SEQ ID NOs: 865, 864 and 863; SEQ ID NOs: 865, 866 and 863; SEQ ID NOs: 867, 868 and 863; SEQ ID NOs: 869, 862 and 863; SEQ ID NOs: 869, 864 and 863; SEQ ID NOs: 870, 864 and 863; SEQ ID NOs: 870, 866 and 863; SEQ ID NOs: 871, 872 and 863; SEQ ID NOs: 871, 868 and 863; SEQ ID NOs: 881, 882 and 883; SEQ ID NOs: 881, 884 and 883; SEQ ID NOs: 885, 884 and 883; SEQ ID NOs: 885, 886 and 883; SEQ ID NOs: 887, 888 and 883; SEQ ID NOs: 889, 882 and 883; SEQ ID NOs: 889, 884 and 883; SEQ ID NOs: 890, 884 and 883; SEQ ID NOs: 890, 886 and 883; SEQ ID NOs: 891, 892 and 883; or SEQ ID NOs: 891, 888 and 883. In some embodiments, the first antigen binding domain is a scFv that binds to CD3 and the second antigen binding domain is a Fab that binds to HIV gp120, wherein the first antigen binding domain comprises a first heavy chain (HC), and the second antigen binding domain comprises a second HC and a light chain (LC), the first HC, the second HC and the LC comprising the amino acid sequences set forth, respectively, or comprising amino acid sequences that are at least 80%, at least 85%, at least 90%, at least 91%, at least 92%, at least 93%, at least 94%, at least 95%, at least 96%, at least 97%, at least 98%, or at least 99% identical to the amino acid sequences set forth, respectively: SEQ ID NOs: 800, 801 and 802; SEQ ID NOs: 800, 803 and 802; SEQ ID NOs: 804, 803 and 802; SEQ ID NOs: 804, 805 and 802; SEQ ID NOs: 821, 822 and 823; SEQ ID NOs: 824, 825 and 823; SEQ ID NOs: 826, 825 and 823; SEQ ID NOs: 826, 827 and 823; SEQ ID NOs: 828, 829 and 823; SEQ ID NOs: 861, 862 and 863; SEQ ID NOs: 861, 864 and 863; SEQ ID NOs: 865, 864 and 863; SEQ ID NOs: 865, 866 and 863; SEQ ID NOs: 867, 868 and 863; SEQ ID NOs: 881, 882 and 883; SEQ ID NOs: 881, 884 and 883; SEQ ID NOs: 885, 884 and 883; SEQ ID NOs: 885, 886 and 883; or SEQ ID NOs: 887, 888 and 883. In some embodiments, the first antigen binding domain is a scFv that binds to CD3 and the second antigen binding domain is a Fab that binds to HIV gp120, wherein the first antigen binding domain comprises a first heavy chain (HC), and the second antigen binding domain comprises a second HC and a light chain (LC), the first HC, the second HC and the LC comprising the amino acid sequences set forth, respectively, or comprising amino acid sequences that are at least 80%, at least 85%, at least 90%, at least 91%, at least 92%, at least 93%, at least 94%, at least 95%, at least 96%, at least 97%, at least 98%, or at least 99% identical to the amino acid sequences set forth, respectively: SEQ ID NOs: 800, 801 and 802; SEQ ID NOs: 800, 803 and 802; SEQ ID NOs: 804, 803 and 802; SEQ ID NOs: 804, 805 and 802; SEQ ID NOs: 821, 822 and 823; SEQ ID NOs: 824, 825 and 823; SEQ ID NOs: 826, 825 and 823; SEQ ID NOs: 826, 827 and 823; SEQ ID NOs: 828, 829 and 823; SEQ ID NOs: 861, 862 and 863; SEQ ID NOs: 861, 864 and 863; SEQ ID NOs: 865, 864 and 863; SEQ ID NOs: 865, 866 and 863; or SEQ ID NOs: 867, 868 and 863.

[0018] With respect to further embodiments of the multi-specific (e.g., bispecific) antigen binding molecules, in some embodiments, the multi-specific (e.g., bispecific) antigen binding molecule comprises (a) a first antigen binding domain that comprises a first heavy chain variable domain (VH) and a first light chain variable domain (VL), wherein the first antigen binding domain binds to CD3; and (b) a second antigen binding domain that binds to HIV gp120 comprising one or more extracellular (EC) domain of CD4, wherein the one or more EC domains of CD4 comprise a sequence as set forth below, or a sequence that is at least 80%, at least 85%, at least 90%, at least 91%, at least 92%, at least 93%, at least 94%, at least 95%, at least 96%, at least 97%, at least 98%, or at least 99% identical to a sequence selected from the group consisting of:

(i)
(SEQ ID NO: 746)
KKVVYGKKGDTVELTCTASQKKNIQFHWKNSNQIKILGNQGSFLTKGPSK
LNDRVDSRRSLWDQGNFPLIIKNLKPEDSDTYICEVEDQKEEVQLVVVG;
(ii)
(SEQ ID NO: 747)
KKVVYGKKGDTVELTCTASQKKNIQFHWKNSNQIKILGNQGSFLTKGPSK
LNDRVDSRRSLWDQGNFPLIIKNLKPEDSDTYICEVEDQKEEVQLVVVGG
GGSGKKVVYGKKGDTVELTCTASQKKNIQFHWKNSNQIKILGNQGSFLTK
GPSKLNDRVDSRRSLWDQGNFPLIIKNLKPEDSDTYICEVEDQKEEVQLV
VVG;
(iii)
(SEQ ID NO: 748)
KKVVLGKKGDTVELTCTASQKKSIQFHWKNSNQIKILGNQGSFLTKGPSK
LNDRADSRRSLWDQGNFPLIIKNLKIEDSDTYICEVEDQKEEVQLLVFG;
or
(iv)
(SEQ ID NO: 749)
KKVVLGKKGDTVELTCTASQKKSIQFHWKNSNQIKILGNQGSFLTKGPSK
LNDRADSRRSLWDQGNFPLIIKNLKIEDSDTYICEVEDQKEEVQLLVFGG
GGSGKKVVLGKKGDTVELTCTASQKKSIQFHWKNSNQIKILGNQGSFLTK
GPSKLNDRADSRRSLWDQGNFPLIIKNLKIEDSDTYICEVEDQKEEVQLL
VFG.

[0019] In some embodiments, the first antigen binding domain comprises a first VH-CDR1, a first VH-CDR2, a first VH-CDR3, a first VL-CDR1, a first VL-CDR2 and a first VL-CDR3 comprising the following amino acid sequences, respectively (according to Kabat): SEQ ID NOs: 1, 11, 8, 4, 9 and 10; or SEQ ID NOs: 1, 12, 8, 4, 9 and 10; and the second antigen binding domain comprises one or more EC domains of CD4 comprising an amino acid sequence that comprises or is at least 80%, at least 85%, at least 90%, at least 91%, at least 92%, at least 93%, at least 94%, at least 95%, at least 96%, at least 97%, at least 98%, or at least 99%, identical to a CD4 EC domain selected from the group consisting of SEQ ID NOs: 746-749, e.g., SEQ ID NO: 746. In some embodiments, the first antigen binding domain comprises a first VH-CDR1, a first VH-CDR2, a first VH-CDR3, a first VL-CDR1, a first VL-CDR2 and a first VL-CDR3 comprising the following amino acid sequences, respectively (according to Kabat): SEQ ID NOs: 1, 12, 8, 4, 9 and 10; and the second antigen binding domain comprises one EC domain of CD4 comprising an amino acid sequence that is at least 80%, at least 85%, at least 90%, at least 91%, at least 92%, at least 93%, at least 94%, at least 95%, at least 96%, at least 97%, at least 98%, or at least 99%, identical to a CD4 EC domain of SEQ ID NO:746. In some embodiments, the first antigen binding domain comprises a first VH-CDR1, a first VH-CDR2, a first VH-CDR3, a first VL-CDR1, a first VL-CDR2 and a first VL-CDR3 comprising the following amino acid sequences, respectively (according to Kabat): SEQ ID NOs: 1, 12, 8, 4, 9 and 10; and the second antigen binding domain comprises one EC domain of CD4 comprising an amino acid sequence that is at least 95% identical to a CD4 EC domain of SEQ ID NO:746. In some embodiments, the first antigen binding domain comprises a first VH-CDR1, a first VH-CDR2, a first VH-CDR3, a first VL-CDR1, a first VL-CDR2 and a first VL-CDR3 comprising the following amino acid sequences, respectively (according to Kabat): SEQ ID NOs: 1, 12, 8, 4, 9 and 10; and the second antigen binding domain comprises one EC domain of CD4 comprising an amino acid sequence that is at least 99% identical to a CD4 EC domain of SEQ ID NO:746. In some embodiments, the first antigen binding domain comprises a first VH-CDR1, a first VH-CDR2, a first VH-CDR3, a first VL-CDR1, a first VL-CDR2 and a first VL-CDR3 comprising the following amino acid sequences, respectively (according to Kabat): SEQ ID NOs: 1, 12, 8, 4, 9 and 10; and the second antigen binding domain comprises one EC domain of CD4 comprising the amino acid sequence of SEQ ID NO:746. In some embodiments, the first antigen binding domain comprises a first VH-CDR1, a first VH-CDR2, a first VH-CDR3, a first VL-CDR1, a first VL-CDR2 and a first VL-CDR3 comprising the following amino acid sequences, respectively (according to Chothia): SEQ ID NOs: 17, 18, 23, 20, 24 and 25; and the second antigen binding domain comprises one or more EC domains of CD4 comprising an amino acid sequence that comprises or is at least 80%, at least 85%, at least 90%, at least 91%, at least 92%, at least 93%, at least 94%, at least 95%, at least 96%, at least 97%, at least 98%, or at least 99%, identical to a CD4 EC domain selected from the group consisting of SEQ ID NOs: 746-749, e.g., SEQ ID NO: 746. In some embodiments, the first antigen binding domain comprises a first VH-CDR1, a first VH-CDR2, a first VH-CDR3, a first VL-CDR1, a first VL-CDR2 and a first VL-CDR3 comprising the following amino acid sequences, respectively (according to Chothia): SEQ ID NOs: 17, 18, 23, 20, 24 and 25; and the second antigen binding domain comprises one EC domain of CD4 comprising an amino acid sequence is at least 95% (e.g., at least 96%, at least 97%, at least 98%, or at least 99%) identical to a CD4 EC domain of SEQ ID NO:746. In some embodiments, the first antigen binding domain comprises a first VH-CDR1, a first VH-CDR2, a first VH-CDR3, a first VL-CDR1, a first VL-CDR2 and a first VL-CDR3 comprising the following amino acid sequences, respectively (according to Chothia): SEQ ID NOs: 17, 18, 23, 20, 24 and 25; and the second antigen binding domain comprises one EC domain of CD4 comprising the amino acid sequence of SEQ ID NO:746. In some embodiments, the first antigen binding domain comprises a first VH-CDR1, a first VH-CDR2, a first VH-CDR3, a first VL-CDR1, a first VL-CDR2 and a first VL-CDR3 comprising the following amino acid sequences, respectively (according to IMGT): SEQ ID NOs: 28, 29, 32, 31, 24 and 10; and the second antigen binding domain comprises one or more EC domains of CD4 comprising an amino acid sequence that comprises or is at least 80%, at least 85%, at least 90%, at least 91%, at least 92%, at least 93%, at least 94%, at least 95%, at least 96%, at least 97%, at least 98%, or at least 99%, identical to a CD4 EC domain selected from the group consisting of SEQ ID NOs: 746-749, e.g., SEQ ID NO: 746. In some embodiments, the first antigen binding domain comprises a first VH-CDR1, a first VH-CDR2, a first VH-CDR3, a first VL-CDR1, a first VL-CDR2 and a first VL-CDR3 comprising the following amino acid sequences, respectively (according to IMGT): SEQ ID NOs: 28, 29, 32, 31, 24 and 10; and the second antigen binding domain comprises one EC domain of CD4 comprising an amino acid sequence is at least 95% (e.g., at least 96%, at least 97%, at least 98%, or at least 99%) identical to a CD4 EC domain of SEQ ID NO:746. In some embodiments, the first antigen binding domain comprises a first VH-CDR1, a first VH-CDR2, a first VH-CDR3, a first VL-CDR1, a first VL-CDR2 and a first VL-CDR3 comprising the following amino acid sequences, respectively (according to IMGT): SEQ ID NOs: 28, 29, 32, 31, 24 and 10; and the second antigen binding domain comprises one EC domain of CD4 comprising the amino acid sequence of SEQ ID NO:746. In some embodiments, the first antigen binding domain comprises a first VH-CDR1, a first VH-CDR2, a first VH-CDR3, a first VL-CDR1, a first VL-CDR2 and a first VL-CDR3 comprising the following amino acid sequences, respectively (according to Honegger): SEQ ID NOs: 34, 42, 40, 37, 41 and 25; or SEQ ID NOs: 34, 43, 40, 37, 41 and 25; and the second antigen binding domain comprises one or more EC domains of CD4 comprising an amino acid sequence that comprises or is at least 80%, at least 85%, at least 90%, at least 91%, at least 92%, at least 93%, at least 94%, at least 95%, at least 96%, at least 97%, at least 98%, or at least 99%, identical to a CD4 EC domain selected from the group consisting of SEQ ID NOs: 746-749, e.g., SEQ ID NO: 746. In some embodiments, the first antigen binding domain comprises a first VH-CDR1, a first VH-CDR2, a first VH-CDR3, a first VL-CDR1, a first VL-CDR2 and a first VL-CDR3 comprising the following amino acid sequences, respectively (according to Honegger): SEQ ID NOs: 34, 43, 40, 37, 41 and 25; and the second antigen binding domain comprises one EC domain of CD4 comprising an amino acid sequence that comprises or is at least 80%, at least 85%, at least 90%, at least 91%, at least 92%, at least 93%, at least 94%, at least 95%, at least 96%, at least 97%, at least 98%, or at least 99%, identical to a CD4 EC domain of SEQ ID NO:746. In some embodiments, the first antigen binding domain comprises a first VH-CDR1, a first VH-CDR2, a first VH-CDR3, a first VL-CDR1, a first VL-CDR2 and a first VL-CDR3 comprising the following amino acid sequences, respectively (according to Honegger): SEQ ID NOs: 34, 43, 40, 37, 41 and 25; and the second antigen binding domain comprises one EC domain of CD4 comprising an amino acid sequence is at least 95% (e.g., at least 96%, at least 97%, at least 98%, or at least 99%) identical to a CD4 EC domain of SEQ ID NO:746. In some embodiments, the first antigen binding domain comprises a first VH-CDR1, a first VH-CDR2, a first VH-CDR3, a first VL-CDR1, a first VL-CDR2 and a first VL-CDR3 comprising the following amino acid sequences, respectively (according to Honegger): SEQ ID NOs: 34, 43, 40, 37, 41 and 25; and the second antigen binding domain comprises one EC domain of CD4 comprising the amino acid sequence of SEQ ID NO:746. In some embodiments, the first antigen binding domain comprises a first VH and a first VL comprising the amino acid sequences set forth, respectively, or comprising amino acid sequences that are at least 80%, at least 85%, at least 90%, at least 91%, at least 92%, at least 93%, at least 94%, at least 95%, at least 96%, at least 97%, at least 98%, or at least 99% identical to the amino acid sequences set forth, respectively: SEQ ID NOs: 49 and 55; SEQ ID NOs: 50 and 55; SEQ ID NOs: 50 and 56; SEQ ID NOs: 51 and 55; or SEQ ID NOs: 51 and 56; and the second antigen binding domain comprises one or more EC domains of CD4 comprising an amino acid sequence that comprises or is at least 80%, at least 85%, at least 90%, at least 91%, at least 92%, at least 93%, at least 94%, at least 95%, at least 96%, at least 97%, at least 98%, or at least 99%, identical to a CD4 EC domain selected from the group consisting of SEQ ID NOs: 746-749, e.g., SEQ ID NO: 746. In some embodiments, the first antigen binding domain comprises a first VH and a first VL comprising amino acid sequences that are at least 80%, at least 85%, at least 90%, at least 91%, at least 92%, at least 93%, at least 94%, at least 95%, at least 96%, at least 97%, at least 98%, or at least 99% identical to the amino acid sequences set forth, respectively: SEQ ID NOs: 50 and 56; and the second antigen binding domain comprises one EC domain of CD4 comprising an amino acid sequence that is at least 80%, at least 85%, at least 90%, at least 91%, at least 92%, at least 93%, at least 94%, at least 95%, at least 96%, at least 97%, at least 98%, or at least 99%, identical to a CD4 EC domain of SEQ ID NO:746. In some embodiments, the first antigen binding domain comprises a first VH and a first VL comprising amino acid sequences that are at least 80%, at least 85%, at least 90%, at least 91%, at least 92%, at least 93%, at least 94%, at least 95%, at least 96%, at least 97%, at least 98%, or at least 99% identical to the amino acid sequences set forth, respectively: SEQ ID NOs: 51 and 56; and the second antigen binding domain comprises one EC domain of CD4 comprising an amino acid sequence that is at least 80%, at least 85%, at least 90%, at least 91%, at least 92%, at least 93%, at least 94%, at least 95%, at least 96%, at least 97%, at least 98%, or at least 99%, identical to a CD4 EC domain of SEQ ID NO:746. In some embodiments, the first antigen binding domain is a Fab that binds to CD3 and the second antigen binding domain is a scFv or an EC domain of CD4 that binds to HIV gp120, wherein the first antigen binding domain comprises a first HC and a LC, and the second antigen binding domain comprises a second HC, the second HC, the first HC and the LC comprising the amino acid sequences set forth, respectively, or comprising amino acid sequences that are at least 80%, at least 85%, at least 90%, at least 91%, at least 92%, at least 93%, at least 94%, at least 95%, at least 96%, at least 97%, at least 98%, or at least 99% identical to the amino acid sequences set forth, respectively: SEQ ID NOs: 751, 752 and 753; SEQ ID NOs: 754, 752 and 753; SEQ ID NOs: 755, 756 and 753; SEQ ID NOs: 755, 757 and 753; SEQ ID NOs: 758, 757 and 753; SEQ ID NOs: 759, 756 and 753; SEQ ID NOs: 754, 760 and 761; SEQ ID NOs: 762, 760 and 761; SEQ ID NOs: 751, 763 and 753; SEQ ID NOs: 764, 752 and 753; SEQ ID NOs: 765, 752 and 753; SEQ ID NOs: 766, 767 and 753; SEQ ID NOs: 766, 768 and 753; SEQ ID NOs: 769, 768 and 753; SEQ ID NOs: 770, 767 and 753; SEQ ID NOs: 765, 771 and 761; SEQ ID NOs: 772, 771 and 761; SEQ ID NOs: 774, 775 and 776; SEQ ID NOs: 777, 778 and 776; SEQ ID NOs: 779, 778 and 776; SEQ ID NOs: 779, 780 and 776; SEQ ID NOs: 777, 781 and 776; SEQ ID NOs: 782, 752 and 753; SEQ ID NOs: 783, 752 and 753; SEQ ID NOs: 784, 785 and 753; SEQ ID NOs: 784, 786 and 753; SEQ ID NOs: 787, 786 and 753; SEQ ID NOs: 788, 785 and 753; SEQ ID NOs: 783, 789 and 761; SEQ ID NOs: 790, 789 and 761; SEQ ID NOs: 792, 793 and 794; SEQ ID NOs: 795, 796 and 794; SEQ ID NOs: 797, 796 and 794; SEQ ID NOs: 797, 798 and 794; or SEQ ID NOs: 795, 799 and 794. In some embodiments, the first antigen binding domain is a Fab that binds to CD3 and the second antigen binding domain is a scFv or an EC domain of CD4 that binds to HIV gp120, wherein the first antigen binding domain comprises a first HC and a LC, and the second antigen binding domain comprises a second HC, the second HC, the first HC and the LC comprising the amino acid sequences set forth, respectively, or comprising amino acid sequences that are at least 80%, at least 85%, at least 90%, at least 91%, at least 92%, at least 93%, at least 94%, at least 95%, at least 96%, at least 97%, at least 98%, or at least 99% identical to the amino acid sequences set forth, respectively: SEQ ID NOs: 751, 752 and 753; SEQ ID NOs: 754, 752 and 753; SEQ ID NOs: 755, 756 and 753; SEQ ID NOs: 755, 757 and 753; SEQ ID NOs: 758, 757 and 753; SEQ ID NOs: 759, 756 and 753; SEQ ID NOs: 764, 752 and 753; SEQ ID NOs: 765, 752 and 753; SEQ ID NOs: 766, 767 and 753; SEQ ID NOs: 766, 768 and 753; SEQ ID NOs: 769, 768 and 753; SEQ ID NOs: 770, 767 and 753; SEQ ID NOs: 777, 778 and 776; SEQ ID NOs: 779, 778 and 776; SEQ ID NOs: 779, 780 and 776; SEQ ID NOs: 777, 781 and 776; SEQ ID NOs: 782, 752 and 753; SEQ ID NOs: 783, 752 and 753; SEQ ID NOs: 784, 785 and 753; SEQ ID NOs: 784, 786 and 753; SEQ ID NOs: 787, 786 and 753; SEQ ID NOs: 788, 785 and 753; SEQ ID NOs: 795, 796 and 794; SEQ ID NOs: 797, 796 and 794; SEQ ID NOs: 797, 798 and 794; or SEQ ID NOs: 795, 799 and 794. In some embodiments, the first antigen binding domain is a Fab that binds to CD3 and the second antigen binding domain is a scFv or an EC domain of CD4 that binds to HIV gp120, wherein the first antigen binding domain comprises a first HC and a LC, and the second antigen binding domain comprises a second HC, the second HC, the first HC and the LC comprising the amino acid sequences set forth, respectively, or comprising amino acid sequences that are at least 80%, at least 85%, at least 90%, at least 91%, at least 92%, at least 93%, at least 94%, at least 95%, at least 96%, at least 97%, at least 98%, or at least 99% identical to the amino acid sequences set forth, respectively: SEQ ID NOs: 751, 752 and 753; SEQ ID NOs: 754, 752 and 753; SEQ ID NOs: 755, 756 and 753; SEQ ID NOs: 755, 757 and 753; SEQ ID NOs: 758, 757 and 753; or SEQ ID NOs: 759, 756 and 753. In some embodiments, the first antigen binding domain is a Fab that binds to CD3 and the second antigen binding domain is a scFv or an EC domain of CD4 that binds to HIV gp120, wherein the first antigen binding domain comprises a first HC and a LC, and the second antigen binding domain comprises a second HC, the second HC, the first HC and the LC comprising the amino acid sequences set forth, respectively, or comprising amino acid sequences that are at least 80%, at least 85%, at least 90%, at least 91%, at least 92%, at least 93%, at least 94%, at least 95%, at least 96%, at least 97%, at least 98%, or at least 99% identical to the amino acid sequences set forth, respectively: SEQ ID NOs: 751, 752 and 753; or SEQ ID NOs: 755, 756 and 753. In some embodiments, the first antigen binding domain is a Fab that binds to CD3 and the second antigen binding domain is a scFv or an EC domain of CD4 that binds to HIV gp120, wherein the first antigen binding domain comprises a first HC and a LC, and the second antigen binding domain comprises a second HC, the second HC, the first HC and the LC comprising the amino acid sequences set forth, respectively, or comprising amino acid sequences that are at least 80%, at least 85%, at least 90%, at least 91%, at least 92%, at least 93%, at least 94%, at least 95%, at least 96%, at least 97%, at least 98%, or at least 99% identical to the amino acid sequences set forth, respectively: SEQ ID NOs: 751, 752 and 753. In some embodiments, the first antigen binding domain is a Fab that binds to CD3 and the second antigen binding domain is a scFv or an EC domain of CD4 that binds to HIV gp120, wherein the first antigen binding domain comprises a first HC and a LC, and the second antigen binding domain comprises a second HC, the second HC, the first HC and the LC comprising the amino acid sequences set forth, respectively, or comprising amino acid sequences that are at least 80%, at least 85%, at least 90%, at least 91%, at least 92%, at least 93%, at least 94%, at least 95%, at least 96%, at least 97%, at least 98%, or at least 99% identical to the amino acid sequences set forth, respectively: SEQ ID NOs: 755, 756 and 753.

[0020] With respect to further embodiments of the multi-specific (e.g., bispecific) antigen binding molecules, in some embodiments, the multi-specific antigen binding molecule is a bispecific antigen binding molecule. In some embodiments, the multi-specific antigen binding molecule binds to or targets human CD3 and HIV gp120. In some embodiments, the first VH and the first VL have at least 80%, 81%, 82%, 83%, 84%, 85%, or more, sequence similarity to a human germline VH and a human germline VL, respectively. In some embodiments, the first antigen binding domain has reduced or insignificant or substantially no binding to Protein A, or does not detectably bind to Protein A. In some embodiments, the first antigen binding domain binds to Protein A with a binding equilibrium dissociation constant (K_{D}) of greater than 10⁻⁶ M. In some embodiments, the first antigen binding domain binds to CD3 with a K_{D} of lower than 10 nM, e.g., lower than 9.5 nM, 9.0 nM, 8.5 nM, 8.0 nM, 7.5 nM, 7.0 nM, 6.5 nM, 6.0 nM, 5.5 nM, 5.0 nM, 4.5 nM, 4.0 nM, 3.5 nM, 3.0 nM, or lower. In some embodiments, the first antigen binding domain binds to CD3 with a K_{D} of lower than 3.0 nM (e.g., 2.5 nM). In some embodiments, the multi-specific (e.g., bispecific) antigen binding molecule has a serum half-life in a human or cynomolgus monkey of at least 3 days, e.g., at least 4 days, at least 5 days, at least 6 days, at least 7 days, at least 8 days, at least 9 days, at least 10 days, at least 11 days, at least 12 days, at least 13 days, at least 14 days, at least 15 days, at least 16 days, or longer. In some embodiments, the multi-specific (e.g., bispecific) antigen binding molecule has a serum half-life in a human or cynomolgus monkey of at least 7 days. In some embodiments, the multi-specific (e.g., bispecific) antigen binding molecule has a serum half-life in a human of at least 7 days. In some embodiments, the first antigen binding domain binds to CD3 with a K_{D} of lower than 7.0 nM, e.g., lower than 6.5 nM, 6.0 nM, 5.5 nM, 5.0 nM, 4.5 nM, 4.0 nM, 3.5 nM, 3.0 nM, or lower, and the multi-specific (e.g., bispecific) antigen binding molecule has a serum half-life in a human or cynomolgus monkey of at least at least 5 days, e.g., at least 5.5 days, at least 6 days, at least 6.5 days, at least 7 days, at least 7.5 days, at least 8 days, at least 8.5 days, at least 9 days, at least 10 days, at least 11 days, at least 12 days, at least 13 days, at least 14 days, or longer. In some embodiments, the first antigen binding domain binds to CD3 with a K_{D} of lower than 3.0 nM (e.g., 2.5 nM), and the multi-specific (e.g., bispecific) antigen binding molecule has a serum half-life in a human or cynomolgus monkey of at least 7 days. In some embodiments, the first antigen binding domain binds to CD3 with a K_{D} of lower than 3.0 nM (e.g., 2.5 nM), and the multi-specific (e.g., bispecific) antigen binding molecule has a serum half-life in a human of at least 7 days. In some embodiments, at least 50%, at least 60%, at least 70%, least 80%, at least 85%, at least 90%, or more, N-linked glycosylation sites in at least one of the first VH, the first VL, the second VH and the second VL are sialylated. In some embodiments, the N-linked glycosylation sites in at least one of the first VH, the first VL, the second VH and the second VL have a sialic acid occupancy (e.g., a glycan comprising one or two terminal sialic acid residues) of at least 40%, at least 50%, at least 60%, at least 70%, least 80%, at least 85%, at least 90%, or more. In some embodiments, the sialylated N-linked glycosylation sites in at least one of the first VH, the first VL, the second VH and the second VL comprise from 1 to 5 sialic acid residues, e.g., from 1 to 4 sialic acid residues, e.g., from 1 to 3 sialic acid residues, e.g., from 1 to 2 sialic acid residues. In some embodiments, at least one of the first VH, the first VL, the second VH and the second VL are sialylated with N-acetylneuraminic acid (NANA). In some embodiments, the sialic acid residues are present in biantennary structures. In some embodiments, the sialic acid residues are present in complex N-linked glycan structures. In some embodiments, the sialic acid residues are present in hybrid N-linked glycan structures. In some embodiments, the glycans are terminally sialylated.

[0021] In another aspect, provided is a polynucleotide or multiple polynucleotides encoding at least the first VH and the first VL of the multi-specific (e.g., bispecific) antigen binding molecule, as described herein. In some embodiments, the polynucleotide or polynucleotides, further comprise a polynucleotide or multiple polynucleotides encoding the second VH and the second VL of the multi-specific (e.g., bispecific) antigen binding molecule, as described herein. In some embodiments, the polynucleotide or polynucleotides comprise a polynucleotide or multiple polynucleotides encoding the HC of the first antigen binding domain that is an scFv, and the HC and LC of the second antigen binding domain that is a Fab, of the multi-specific (e.g., bispecific) antigen binding molecule, as described herein. In some embodiments, the polynucleotide or polynucleotides comprise a polynucleotide or multiple polynucleotides encoding the HC and LC of the first antigen binding domain that is a Fab, and the HC of the second antigen binding domain that is an scFv or an EC domain of CD4, of the multi-specific (e.g., bispecific) antigen binding molecule. In some embodiments, the polynucleotide or polynucleotides comprise a polynucleotide or multiple polynucleotides encoding the HC and LC of the first antigen binding domain that is a Fab, and the HC of the second antigen binding domain that is an EC domain of CD4, of the multi-specific (e.g., bispecific) antigen binding molecule. In some embodiments, the polynucleotide or polynucleotides encode a multi-specific antigen binding molecule, as described herein, comprising the following polynucleotide sequences, or polynucleotide sequences that are at least 80%, at least 85%, at least 90%, at least 91%, at least 92%, at least 93%, at least 94%, at least 95%, at least 96%, at least 97%, at least 98%, or at least 99% identical to the polynucleotide sequences set forth, respectively: SEQ ID NOs: 995, 996 and 997; SEQ ID NOs: 998, 999 and 1000; SEQ ID NOs: 1001, 1002 and 1003; SEQ ID NOs: 1004, 1005 and 1000; SEQ ID NOs: 1006, 1002 and 997; SEQ ID NOs: 1007, 1093 and 1000; SEQ ID NOs: 998, 1008 and 1000; SEQ ID NOs: 998, 1009 and 1000; SEQ ID NOs: 1010, 1011 and 1012; SEQ ID NOs: 1013, 1014 and 1015; SEQ ID NOs: 1016, 1017 and 1012; SEQ ID NOs: 1018, 1019 and 1012; SEQ ID NOs: 1018, 1020 and 1012; SEQ ID NOs: 1021, 1022 and 1023; or SEQ ID NOs: 1024, 1025 and 1023. In some embodiments, the polynucleotide or polynucleotides encode a multi-specific antigen binding molecule, as described herein, comprising polynucleotide sequences that are at least 80%, at least 85%, at least 90%, at least 91%, at least 92%, at least 93%, at least 94%, at least 95%, at least 96%, at least 97%, at least 98%, or at least 99% identical to the polynucleotide sequences set forth, respectively: SEQ ID NOs: 995, 996 and 997. In some embodiments, the polynucleotide or polynucleotides encode a multi-specific antigen binding molecule, as described herein, comprising polynucleotide sequences that are at least 95% (e.g., at least 96%, at least 97%, at least 98%, or at least 99%) identical to the polynucleotide sequences set forth: SEQ ID NOs: 995, 996 and 997. In some embodiments, the polynucleotide or polynucleotides encode a multi-specific antigen binding molecule, as described herein, comprising the following polynucleotide sequences: SEQ ID NOs: 995, 996 and 997. In some embodiments, the polynucleotide or polynucleotides encode a multi-specific antigen binding molecule, as described herein, comprising polynucleotide sequences that are at least 80%, at least 85%, at least 90%, at least 91%, at least 92%, at least 93%, at least 94%, at least 95%, at least 96%, at least 97%, at least 98%, or at least 99% identical to the polynucleotide sequences set forth, respectively: SEQ ID NOs: 998, 999 and 1000. In some embodiments, the polynucleotide or polynucleotides encode a multi-specific antigen binding molecule, as described herein, comprising polynucleotide sequences that are at least 95% (e.g., at least 96%, at least 97%, at least 98%, or at least 99%) identical to the polynucleotide sequences set forth: SEQ ID NOs: 998, 999 and 1000. In some embodiments, the polynucleotide or polynucleotides encode a multi-specific antigen binding molecule, as described herein, comprising the following polynucleotide sequences: SEQ ID NOs: 998, 999 and 1000. In some embodiments, the polynucleotide or polynucleotides are comprised of DNA or RNA. In some embodiments, the polynucleotide or polynucleotides are comprised of mRNA. In some embodiments, the polynucleotide or polynucleotides comprise codon bias for efficient expression in a human cell. In a further aspect, provided is a lipoplex, e.g., a lipid nanoparticle (LNP), comprising the polynucleotide or polynucleotides, as described herein. In a further aspect, provided is an expression cassette or multiple expression cassettes comprising one or more regulatory sequences operably linked to the polynucleotide or polynucleotides, as described herein.

[0022] In a further aspect, provided is an expression vector or multiple expression vectors comprising one or more regulatory sequences operably linked to the polynucleotide or polynucleotides, or the expression cassette or expression cassettes, as described herein. In some embodiments, the expression vector or expression vectors comprise a plasmid vector or a viral vector. In some embodiments, the expression vector comprises three, four or five expression cassettes or cistrons. In some embodiments, the expression vector comprises, optionally in sequential order from 5′ to 3′: (i) a first expression cassette or cistron comprising a first polynucleotide encoding an anti-HIV gp120 VL-light chain constant domain (CL) fusion protein; (ii) a second expression cassette or cistron comprising a second polynucleotide encoding an anti-HIV gp120 VH-Fc fusion protein; and (iii) a third expression cassette or cistron comprising a third polynucleotide encoding an anti-CD3 scFv-Fc fusion protein. In some embodiments, the anti-HIV gp120 VL-CL fusion protein, the anti-HIV gp120 VH-Fc fusion protein and the anti-CD3 scFv-Fc fusion protein comprise amino acid sequences set forth, respectively, or comprise amino acid sequences that are at least 80%, at least 85%, at least 90%, at least 91%, at least 92%, at least 93%, at least 94%, at least 95%, at least 96%, at least 97%, at least 98%, or at least 99% identical to the amino acid sequences set forth, respectively: SEQ ID NOs: 802, 801 and 800; SEQ ID NOs: 802, 803 and 800; SEQ ID NOs: 802, 803 and 804; SEQ ID NOs: 802, 805 and 804; SEQ ID NOs: 802, 801 and 806; SEQ ID NOs: 802, 803 and 806; SEQ ID NOs: 802, 803 and 807; SEQ ID NOs: 802, 805 and 807; SEQ ID NOs: 802, 809 and 808; SEQ ID NOs: 802, 810 and 808; SEQ ID NOs: 802, 801 and 811; SEQ ID NOs: 802, 809 and 812; SEQ ID NOs: 802, 810 and 812; SEQ ID NOs: 802, 805 and 813; SEQ ID NOs: 802, 814 and 812; SEQ ID NOs: 802, 801 and 815; SEQ ID NOs: 802, 805 and 816; SEQ ID NOs: 802, 801 and 817; SEQ ID NOs: 802, 805 and 818; SEQ ID NOs: 802, 810 and 819; SEQ ID NOs: 802, 810 and 820; SEQ ID NOs: 823, 822 and 821; SEQ ID NOs: 823, 825 and 824; SEQ ID NOs: 823, 825 and 826; SEQ ID NOs: 823, 827 and 826; SEQ ID NOs: 823, 829 and 828; SEQ ID NOs: 823, 822 and 830; SEQ ID NOs: 823, 825 and 830; SEQ ID NOs: 823, 825 and 831; SEQ ID NOs: 823, 827 and 831; SEQ ID NOs: 823, 833 and 832; SEQ ID NOs: 823, 829 and 832; SEQ ID NOs: 823, 827 and 834; SEQ ID NOs: 823, 829 and 835; SEQ ID NOs: 823, 829 and 836; SEQ ID NOs: 823, 833 and 837; SEQ ID NOs: 823, 838 and 837; SEQ ID NOs: 823, 840 and 839; SEQ ID NOs: 823, 829 and 841; SEQ ID NOs: 823, 829 and 842; SEQ ID NOs: 823, 829 and 843; SEQ ID NOs: 823, 829 and 844; SEQ ID NOs: 823, 829 and 845; SEQ ID NOs: 823, 829 and 846; SEQ ID NOs: 823, 833 and 846; SEQ ID NOs: 823, 838 and 846; SEQ ID NOs: 823, 827 and 847; SEQ ID NOs: 823, 829 and 848; SEQ ID NOs: 823, 829 and 849; SEQ ID NOs: 823, 829 and 850; SEQ ID NOs: 823, 829 and 851; SEQ ID NOs: 823, 829 and 852; SEQ ID NOs: 823, 829 and 853; SEQ ID NOs: 823, 829 and 854; SEQ ID NOs: 823, 829 and 855; SEQ ID NOs: 823, 829 and 856; SEQ ID NOs: 823, 829 and 857; SEQ ID NOs: 823, 829 and 858; SEQ ID NOs: 823, 829 and 859; SEQ ID NOs: 823, 829 and 860; SEQ ID NOs: 863, 862 and 861; SEQ ID NOs: 863, 864 and 861; SEQ ID NOs: 863, 864 and 865; SEQ ID NOs: 863, 866 and 865; SEQ ID NOs: 863, 868 and 867; SEQ ID NOs: 863, 862 and 869; SEQ ID NOs: 863, 864 and 869; SEQ ID NOs: 863, 864 and 870; SEQ ID NOs: 863, 866 and 870; SEQ ID NOs: 863, 872 and 871; SEQ ID NOs: 863, 868 and 871; SEQ ID NOs: 863, 862 and 873; SEQ ID NOs: 863, 866 and 874; SEQ ID NOs: 863, 872 and 875; SEQ ID NOs: 863, 868 and 875; SEQ ID NOs: 863, 876 and 875; SEQ ID NOs: 863, 862 and 877; SEQ ID NOs: 863, 866 and 878; SEQ ID NOs: 863, 862 and 879; SEQ ID NOs: 863, 866 and 880; SEQ ID NOs: 883, 882 and 881; SEQ ID NOs: 883, 884 and 881; SEQ ID NOs: 883, 884 and 885; SEQ ID NOs: 883, 886 and 885; SEQ ID NOs: 883, 888 and 887; SEQ ID NOs: 883, 882 and 889; SEQ ID NOs: 883, 884 and 889; SEQ ID NOs: 883, 884 and 890; SEQ ID NOs: 883, 886 and 890; SEQ ID NOs: 883, 892 and 891; SEQ ID NOs: 883, 888 and 891; SEQ ID NOs: 883, 882 and 883; SEQ ID NOs: 883, 886 and 894; SEQ ID NOs: 883, 892 and 895; SEQ ID NOs: 883, 888 and 895; SEQ ID NOs: 883, 896 and 895; SEQ ID NOs: 883, 882 and 897; SEQ ID NOs: 883, 886 and 898; SEQ ID NOs: 883, 882 and 899; or SEQ ID NOs: 883, 886 and 900. In some embodiments, the expression vector comprises, optionally in sequential order from 5′ to 3′: (i) a first expression cassette or cistron comprising a first polynucleotide encoding an anti-CD3 VL-CL fusion protein; (ii) a second expression cassette or cistron comprising a second polynucleotide encoding an anti-CD3 VH-Fc fusion protein; and (iii) a third expression cassette or cistron comprising a third polynucleotide encoding a CD4 extracellular (EC) domain-Fc fusion protein. In some embodiments, the anti-CD3 VL-CL fusion protein, the anti-CD3 VH-Fc fusion protein and the CD4 EC domain-Fc fusion protein comprise amino acid sequences set forth, respectively, below, or comprise amino acid sequences that are at least 80%, at least 85%, at least 90%, at least 91%, at least 92%, at least 93%, at least 94%, at least 95%, at least 96%, at least 97%, at least 98%, or at least 99% identical to the amino acid sequences set forth, respectively, below: SEQ ID NOs: 753, 752 and 751; SEQ ID NOs: 753, 752 and 754; SEQ ID NOs: 753, 756 and 755; SEQ ID NOs: 753, 757 and 755; SEQ ID NOs: 753, 757 and 758; SEQ ID NOs: 753, 756 and 759; SEQ ID NOs: 761, 760 and 754; SEQ ID NOs: 761, 760 and 762; SEQ ID NOs: 753, 763 and 751; SEQ ID NOs: 753, 752 and 764; SEQ ID NOs: 753, 752 and 765; SEQ ID NOs: 753, 767 and 766; SEQ ID NOs: 753, 768 and 766; SEQ ID NOs: 753, 768 and 769; SEQ ID NOs: 753, 767 and 770; SEQ ID NOs: 761, 771 and 765; SEQ ID NOs: 761, 771 and 772; SEQ ID NOs: 776, 775 and 774; SEQ ID NOs: 776, 778 and 777; SEQ ID NOs: 776, 778 and 779; SEQ ID NOs: 776, 780 and 779; SEQ ID NOs: 776, 781 and 777; SEQ ID NOs: 753, 752 and 782; SEQ ID NOs: 753, 752 and 783; SEQ ID NOs: 753, 785 and 784; SEQ ID NOs: 753, 786 and 784; SEQ ID NOs: 753, 786 and 787; SEQ ID NOs: 753, 785 and 788; SEQ ID NOs: 761, 789 and 783; SEQ ID NOs: 761, 789 and 790; SEQ ID NOs: 794, 793 and 792; SEQ ID NOs: 794, 796 and 795; SEQ ID NOs: 794, 796 and 797; SEQ ID NOs: 794, 798 and 797; or SEQ ID NOs: 794, 799 and 795. In some embodiments, the anti-CD3 VL-CL fusion protein, the anti-CD3 VH-Fc fusion protein and the CD4 EC domain-Fc fusion protein comprise amino acid sequences that are at least 80%, at least 85%, at least 90%, at least 91%, at least 92%, at least 93%, at least 94%, at least 95%, at least 96%, at least 97%, at least 98%, or at least 99% identical to the amino acid sequences set forth, respectively: SEQ ID NOs: 753, 752 and 751. In some embodiments, the anti-CD3 VL-CL fusion protein, the anti-CD3 VH-Fc fusion protein and the CD4 EC domain-Fc fusion protein comprise amino acid sequences set forth, respectively: SEQ ID NOs: 753, 752 and 751. In some embodiments, the first, second and third expression cassettes or cistrons each comprise a promoter of identical or equivalent transcription strength, e.g., a constitutive promoter, e.g., a promoter selected from cytomegalovirus (CMV), SV40, RSV, EF1a, UBC, PGK and CAGG. In some embodiments, the first, second and third expression cassettes or cistrons comprise one or more promoters of different transcription strength. In embodiments, the expression vector further comprises a fourth expression cassette or cistron positioned 5′ to the first expression cassette or cistron comprising a polynucleotide encoding a eukaryotic selection marker protein, e.g., glutamine synthetase (GS). Generally, the fourth expression cassette or cistron, positioned 5′ to the first expression cassette and comprising a polynucleotide encoding a eukaryotic selection marker protein, is translated from the same strand as the first, second and third expression cassettes or cistrons.

[0023] In a further aspect, provided is a cell or population of cells. In various embodiments, the cell or population of cells comprise the polynucleotide or polynucleotides of, the expression cassette or multiple expression cassettes, or the expression vector or expression vectors, as described herein. In some embodiments, the cell or population of cells comprises a eukaryotic cell. In some embodiments, the cell or population of cells comprises a mammalian cell, an insect cell, a plant cell or a yeast cell. In some embodiments, the mammalian cell is a Chinese Hamster Ovary (CHO) cell. In some embodiments, the mammalian cell is a human cell. In some embodiments, the cell is a human embryonic kidney cell. In some embodiments, the cell predominantly sialylates N-linked glycosylation sites in the variable domains (Fv) of expressed antigen binding molecules. In some embodiments, at least 50%, at least 80%, at least 85%, at least 90%, at least 91%, at least 92%, at least 93%, at least 94%, at least 95%, or more, N-linked glycosylation sites in the variable domains (Fv) of expressed antigen binding molecules are sialylated.

[0024] In a further aspect, provided is a pharmaceutical composition comprising one or more multi-specific antigen binding molecules, as described herein, and a pharmaceutically acceptable carrier. In a related aspect, provided is a pharmaceutical composition comprising one or more polynucleotides, described herein, encoding one or more multi-specific antigen binding molecule, described herein, or the lipoplex (e.g., LNP) described herein, and a pharmaceutically acceptable carrier. In some embodiments, the pharmaceutical composition comprises an aqueous formulation. In some embodiments, the pharmaceutical composition comprises one or more multi-specific antigen binding molecules, described herein, at a concentration of from 0.1 mg/ml to 150 mg/ml, e.g., from 0.1 mg/ml to 100 mg/ml, e.g., from 1 mg/ml to 100 mg/ml, e.g., from 5 mg/ml to 60 mg/ml, e.g., from 20 mg/ml to 150 mg/ml, or from 10 mg/ml to 50 mg/ml. In some embodiments, the pharmaceutical composition is lyophilized. In some embodiments, the pharmaceutical composition is formulated for intravenous, intramuscular or subcutaneous administration. In some embodiments, the pharmaceutical composition further comprises a second agent for treating an HIV infection. In some embodiments, the pharmaceutical composition further comprises a toll-like receptor (TLR) agonist or an IL-15 receptor agonist. In some embodiments, the pharmaceutical composition comprises a multi-specific antigen binding molecule having a first antigen binding domain that binds to CD3, and a second antigen binding domain that binds to an epitope or region of gp120 in the CD4 binding site (CD4bs) and comprises one or more extracellular (EC) domains of CD4, and optionally, an IL-15 receptor agonist. In some embodiments, the one or more EC domains of CD4 comprise a sequence as set forth in SEQ ID NOs: 746-749, or a sequence that is at least 80%, at least 85%, at least 90%, at least 91%, at least 92%, at least 93%, at least 94%, at least 95%, at least 96%, at least 97%, at least 98%, or at least 99% identical to an amino acid sequence of SEQ ID NOs: 746-749 (e.g., SEQ ID NO: 746). In some embodiments, the EC domain of CD4 comprises a sequence that is at least 80%, at least 85%, at least 90%, at least 91%, at least 92%, at least 93%, at least 94%, at least 95%, at least 96%, at least 97%, at least 98%, or at least 99% identical to the sequence of SEQ ID NO: 746. In some embodiments, the EC domain of CD4 comprises a sequence that is at least 95% identical to the sequence of SEQ ID NO: 746. In some embodiments, the EC domain of CD4 comprises a sequence that is at least 99% identical to the sequence of SEQ ID NO: 746. In some embodiments, the EC domain of CD4 comprises the sequence of SEQ ID NO: 746. In some embodiments, the first antigen binding domain comprises a first VH-CDR1, a first VH-CDR2, a first VH-CDR3, a first VL-CDR1, a first VL-CDR2 and a first VL-CDR3 comprising the following amino acid sequences, respectively (according to Kabat): SEQ ID NOs: 1, 11, 8, 4, 9 and 10; or SEQ ID NOs: 1, 12, 8, 4, 9 and 10; and the second antigen binding domain comprises one or more EC domains of CD4 comprising an amino acid sequence that comprises or is at least 80%, at least 85%, at least 90%, at least 91%, at least 92%, at least 93%, at least 94%, at least 95%, at least 96%, at least 97%, at least 98%, or at least 99%, identical to a CD4 EC domain selected from the group consisting of SEQ ID NOs: 746-749 (e.g., SEQ ID NO: 746). In some embodiments, the first antigen binding domain comprises a first VH-CDR1, a first VH-CDR2, a first VH-CDR3, a first VL-CDR1, a first VL-CDR2 and a first VL-CDR3 comprising the following amino acid sequences, respectively (according to Kabat): SEQ ID NOs: 1, 12, 8, 4, 9 and 10; and the second antigen binding domain comprises one EC domain of CD4 comprising an amino acid sequence that is at least 80%, at least 85%, at least 90%, at least 91%, at least 92%, at least 93%, at least 94%, at least 95%, at least 96%, at least 97%, at least 98%, or at least 99%, identical to a CD4 EC domain of SEQ ID NO: 746. In some embodiments, the first antigen binding domain comprises a first VH-CDR1, a first VH-CDR2, a first VH-CDR3, a first VL-CDR1, a first VL-CDR2 and a first VL-CDR3 comprising the following amino acid sequences, respectively (according to Kabat): SEQ ID NOs: 1, 12, 8, 4, 9 and 10; and the second antigen binding domain comprises one EC domain of CD4 comprising an amino acid sequence that is at least 95% identical to a CD4 EC domain of SEQ ID NO: 746. In some embodiments, the first antigen binding domain comprises a first VH-CDR1, a first VH-CDR2, a first VH-CDR3, a first VL-CDR1, a first VL-CDR2 and a first VL-CDR3 comprising the following amino acid sequences, respectively (according to Kabat): SEQ ID NOs: 1, 12, 8, 4, 9 and 10; and the second antigen binding domain comprises one EC domain of CD4 comprising an amino acid sequence that is at least 99% identical to a CD4 EC domain of SEQ ID NO: 746. In some embodiments, the first antigen binding domain comprises a first VH-CDR1, a first VH-CDR2, a first VH-CDR3, a first VL-CDR1, a first VL-CDR2 and a first VL-CDR3 comprising the following amino acid sequences, respectively (according to Kabat): SEQ ID NOs: 1, 12, 8, 4, 9 and 10; and the second antigen binding domain comprises one EC domain of CD4 comprising the amino acid sequence of SEQ ID NO: 746. In some embodiments, the first antigen binding domain comprises a first VH-CDR1, a first VH-CDR2, a first VH-CDR3, a first VL-CDR1, a first VL-CDR2 and a first VL-CDR3 comprising the following amino acid sequences, respectively (according to Chothia): SEQ ID NOs: 17, 18, 23, 20, 24 and 25; and the second antigen binding domain comprises one or more EC domains of CD4 comprising an amino acid sequence that comprises or is at least 80%, at least 85%, at least 90%, at least 91%, at least 92%, at least 93%, at least 94%, at least 95%, at least 96%, at least 97%, at least 98%, or at least 99%, identical to a CD4 EC domain selected from the group consisting of SEQ ID NOs: 746-749 (e.g., SEQ ID NO: 746). In some embodiments, the first antigen binding domain comprises a first VH-CDR1, a first VH-CDR2, a first VH-CDR3, a first VL-CDR1, a first VL-CDR2 and a first VL-CDR3 comprising the following amino acid sequences, respectively (according to Chothia): SEQ ID NOs: 17, 18, 23, 20, 24 and 25; and the second antigen binding domain comprises one EC domain of CD4 comprising an amino acid sequence is at least 95% (e.g., at least 96%, at least 97%, at least 98%, or at least 99%) identical to a CD4 EC domain of SEQ ID NO: 746. In some embodiments, the first antigen binding domain comprises a first VH-CDR1, a first VH-CDR2, a first VH-CDR3, a first VL-CDR1, a first VL-CDR2 and a first VL-CDR3 comprising the following amino acid sequences, respectively (according to Chothia): SEQ ID NOs: 17, 18, 23, 20, 24 and 25; and the second antigen binding domain comprises one EC domain of CD4 comprising the amino acid sequence of SEQ ID NO: 746. In some embodiments, the first antigen binding domain comprises a first VH-CDR1, a first VH-CDR2, a first VH-CDR3, a first VL-CDR1, a first VL-CDR2 and a first VL-CDR3 comprising the following amino acid sequences, respectively (according to IMGT): SEQ ID NOs: 28, 29, 32, 31, 24 and 10; and the second antigen binding domain comprises one or more EC domains of CD4 comprising an amino acid sequence that comprises or is at least 80%, at least 85%, at least 90%, at least 91%, at least 92%, at least 93%, at least 94%, at least 95%, at least 96%, at least 97%, at least 98%, or at least 99%, identical to a CD4 EC domain selected from the group consisting of SEQ ID NOs: 746-749 (e.g., SEQ ID NO: 746). In some embodiments, the first antigen binding domain comprises a first VH-CDR1, a first VH-CDR2, a first VH-CDR3, a first VL-CDR1, a first VL-CDR2 and a first VL-CDR3 comprising the following amino acid sequences, respectively (according to IMGT): SEQ ID NOs: 28, 29, 32, 31, 24 and 10; and the second antigen binding domain comprises one EC domain of CD4 comprising an amino acid sequence is at least 95% (e.g., at least 96%, at least 97%, at least 98%, or at least 99%) identical to a CD4 EC domain of SEQ ID NO: 746. In some embodiments, the first antigen binding domain comprises a first VH-CDR1, a first VH-CDR2, a first VH-CDR3, a first VL-CDR1, a first VL-CDR2 and a first VL-CDR3 comprising the following amino acid sequences, respectively (according to IMGT): SEQ ID NOs: 28, 29, 32, 31, 24 and 10; and the second antigen binding domain comprises one EC domain of CD4 comprising the amino acid sequence of SEQ ID NO: 746. In some embodiments, the first antigen binding domain comprises a first VH-CDR1, a first VH-CDR2, a first VH-CDR3, a first VL-CDR1, a first VL-CDR2 and a first VL-CDR3 comprising the following amino acid sequences, respectively (according to Honegger): SEQ ID NOs: 34, 42, 40, 37, 41 and 25; or SEQ ID NOs: 34, 43, 40, 37, 41 and 25; and the second antigen binding domain comprises one or more EC domains of CD4 comprising an amino acid sequence that comprises or is at least 80%, at least 85%, at least 90%, at least 91%, at least 92%, at least 93%, at least 94%, at least 95%, at least 96%, at least 97%, at least 98%, or at least 99%, identical to a CD4 EC domain selected from the group consisting of SEQ ID NOs: 746-749 (e.g., SEQ ID NO: 746). In some embodiments, the first antigen binding domain comprises a first VH-CDR1, a first VH-CDR2, a first VH-CDR3, a first VL-CDR1, a first VL-CDR2 and a first VL-CDR3 comprising the following amino acid sequences, respectively (according to Honegger): SEQ ID NOs: 34, 43, 40, 37, 41 and 25; and the second antigen binding domain comprises one EC domain of CD4 comprising an amino acid sequence that comprises or is at least 80%, at least 85%, at least 90%, at least 91%, at least 92%, at least 93%, at least 94%, at least 95%, at least 96%, at least 97%, at least 98%, or at least 99%, identical to a CD4 EC domain of SEQ ID NO: 746. In some embodiments, the first antigen binding domain comprises a first VH-CDR1, a first VH-CDR2, a first VH-CDR3, a first VL-CDR1, a first VL-CDR2 and a first VL-CDR3 comprising the following amino acid sequences, respectively (according to Honegger): SEQ ID NOs: 34, 43, 40, 37, 41 and 25; and the second antigen binding domain comprises one EC domain of CD4 comprising an amino acid sequence is at least 95% (e.g., at least 96%, at least 97%, at least 98%, or at least 99%) identical to a CD4 EC domain of SEQ ID NO: 746. In some embodiments, the first antigen binding domain comprises a first VH-CDR1, a first VH-CDR2, a first VH-CDR3, a first VL-CDR1, a first VL-CDR2 and a first VL-CDR3 comprising the following amino acid sequences, respectively (according to Honegger): SEQ ID NOs: 34, 43, 40, 37, 41 and 25; and the second antigen binding domain comprises one EC domain of CD4 comprising the amino acid sequence of SEQ ID NO: 746. In some embodiments, the first antigen binding domain comprises a first VH and a first VL comprising the amino acid sequences set forth, respectively, or comprising amino acid sequences that are at least 80%, at least 85%, at least 90%, at least 91%, at least 92%, at least 93%, at least 94%, at least 95%, at least 96%, at least 97%, at least 98%, or at least 99% identical to the amino acid sequences set forth, respectively: SEQ ID NOs: 49 and 55; SEQ ID NOs: 50 and 55; SEQ ID NOs: 50 and 56; SEQ ID NOs: 51 and 55; or SEQ ID NOs: 51 and 56; and the second antigen binding domain comprises one or more EC domains of CD4 comprising an amino acid sequence that comprises or is at least 80%, at least 85%, at least 90%, at least 91%, at least 92%, at least 93%, at least 94%, at least 95%, at least 96%, at least 97%, at least 98%, or at least 99%, identical to a CD4 EC domain selected from the group consisting of SEQ ID NOs: 746-749 (e.g., SEQ ID NO: 746). In some embodiments, the TLR agonist is a TLR2 agonist, a TLR3 agonist, a TLR7 agonist, a TLR8 agonist or a TLR9 agonist. In some embodiments, the pharmaceutical composition further comprises the TLR7 agonist is selected from the group consisting of vesatolimod, imiquimod, and resiquimod. In some embodiments, the pharmaceutical composition comprises a first multi-specific antigen binding molecule and second or additional antigen binding molecules, wherein the first multi-specific antigen binding molecule and the second or additional antigen binding molecules bind to different epitopes or regions of gp120 selected from the group consisting of: (i) the third variable loop (V3) (e.g., high mannose patch) comprising a N332 oligomannose glycan; (ii) the second variable loop (V2) (e.g., Env trimer apex); (iii) the CD4 binding site (CD4bs); (iv) the gp120/gp41 interface; or (v) the silent face of gp120. In some embodiments, the first multi-specific antigen binding molecule binds to the third variable loop (V3) (e.g., high mannose patch) comprising a N332 oligomannose glycan and the second or additional antigen binding molecules bind to the CD4 binding site (CD4bs). In some embodiments, the first multi-specific antigen binding molecule competes with or comprises VH and VL regions from an antibody selected from the group consisting of GS-9722 (elipovimab), GS-2872, PGT-121, PGT-121.66, PGT-121.414, PGT-122, PGT-123, PGT-124, PGT-125, PGT-126, PGT-128, PGT-130, PGT-133, PGT-134, PGT-135, PGT-136, PGT-137, PGT-138, PGT-139, 10-1074, 10-1074-J, VRC24, 2G12, BG18, 354BG8, 354BG18, 354BG42, 354BG33, 354BG129, 354BG188, 354BG411, 354BG426, DH270.1, DH270.6, PGDM12, VRC41.01, PGDM21, PCDN-33A, BF520.1 and VRC29.03, and the second or additional antigen binding molecules compete with or comprise VH and VL regions from an antibody selected from the group consisting of GS-9723, GS-5423, 3BNC117, 3BNC60, b12, F105, VRC01, VRC07, VRC07-523, VRC03, VRC06, VRC06b01 VRC08, VRC0801, NIH45-46, PGV04 (a.k.a., VRC-PG04); CH103, 44-VRC13.01, 1NC9, 12A12, N6, 1-18, N49-P7, NC-Cow1, IOMA, CH235 and CH235.12, N49P6, N49P7, N49P11, N49P9 and N60P25. In some embodiments, the first multi-specific antigen binding molecule competes with or comprises VH and VL regions from an antibody selected from the group consisting of 10-1074, 10-1074-J, GS-9722 (elipovimab), GS-2872, PGT-121, PGT-121.66, PGT-121.414 and PGT-134, and the second or additional antigen binding molecules compete with or comprise VH and VL regions from an antibody selected from the group consisting of GS-9723, GS-5423, 3BNC117, VRC07 and VRC07-523. In some embodiments, the first multi-specific antigen binding molecule competes with or comprises VH and VL regions from an antibody selected from the group consisting of 10-1074, 10-1074-J, GS-9722 (elipovimab), GS-2872, PGT-121, PGT-121.66, PGT-121.414 and PGT-134, and the second or additional antigen binding molecules comprise an EC domain of CD4. In some embodiments, the first multi-specific antigen binding molecule binds to the CD4 binding site (CD4bs) and the second or additional antigen binding molecules bind to the third variable loop (V3) (e.g., high mannose patch) comprising a N332 oligomannose glycan. In some embodiments, the first multi-specific antigen binding molecule competes with or comprises VH and VL regions from an antibody selected from the group consisting of GS-9723, GS-5423, 3BNC117, 3BNC60, b12, F105, VRC01, VRC07, VRC07-523, VRC03, VRC06, VRC06b01 VRC08, VRC0801, NIH45-46, PGV04 (a.k.a., VRC-PG04); CH103, 44-VRC13.01, 1NC9, 12A12, N6, 1-18, N49-P7, NC-Cow1, IOMA, CH235 and CH235.12, N49P6, N49P7, N49P11, N49P9 and N60P25, and the second or additional antigen binding molecules compete with or comprise VH and VL regions from an antibody selected from the group consisting of GS-9722 (elipovimab), GS-2872, PGT-121, PGT-121.66, PGT-121.414, PGT-122, PGT-123, PGT-124, PGT-125, PGT-126, PGT-128, PGT-130, PGT-133, PGT-134, PGT-135, PGT-136, PGT-137, PGT-138, PGT-139, 10-1074, 10-1074-J, VRC24, 2G12, BG18, 354BG8, 354BG18, 354BG42, 354BG33, 354BG129, 354BG188, 354BG411, 354BG426, DH270.1, DH270.6, PGDM12, VRC41.01, PGDM21, PCDN-33A, BF520.1 and VRC29.03. In some embodiments, the first multi-specific antigen binding molecule competes with or comprises VH and VL regions from an antibody selected from the group consisting of GS-9723, GS-5423, 3BNC117, VRC07 and VRC07-523, and the second or additional antigen binding molecules compete with or comprise VH and VL regions from an antibody selected from the group consisting of 10-1074, 10-1074-J, GS-9722 (elipovimab), GS-2872, PGT-121, PGT-121.66, PGT-121.414 and PGT-134. In some embodiments, the first multi-specific antigen binding molecule competes with or comprises an EC domain of CD4, and the second or additional antigen binding molecules compete with or comprise VH and VL regions from an antibody selected from the group consisting of GS-9722 (elipovimab), GS-2872, PGT-121, PGT-121.66, PGT-121.414, PGT-122, PGT-123, PGT-124, PGT-125, PGT-126, PGT-128, PGT-130, PGT-133, PGT-134, PGT-135, PGT-136, PGT-137, PGT-138, PGT-139, 10-1074, 10-1074-J, VRC24, 2G12, BG18, 354BG8, 354BG18, 354BG42, 354BG33, 354BG129, 354BG188, 354BG411, 354BG426, DH270.1, DH270.6, PGDM12, VRC41.01, PGDM21, PCDN-33A, BF520.1 and VRC29.03. In some embodiments, the first multi-specific antigen binding molecule competes with or comprises an EC domain of CD4, and the second or additional antigen binding molecules compete with or comprise VH and VL regions from an antibody selected from the group consisting of 10-1074, 10-1074-J, GS-9722 (elipovimab), GS-2872, PGT-121, PGT-121.66, PGT-121.414 and PGT-134. In some embodiments, the pharmaceutical composition further comprises additional antigen binding molecules that compete with or comprise VH and VL regions from an antibody selected from the group consisting of GS-9723, GS-5423, 3BNC117, 3BNC60, b12, F105, VRC01, VRC07, VRC07-523, VRC03, VRC06, VRC06b01 VRC08, VRC0801, NIH45-46, PGV04 (a.k.a., VRC-PG04); CH103, 44-VRC13.01, 1NC9, 12A12, N6, 1-18, N49-P7, NC-Cow1, IOMA, CH235 and CH235.12, N49P6, N49P7, N49P11, N49P9 and N60P25. In some embodiments, the pharmaceutical composition further comprises additional antigen binding molecules that compete with or comprise VH and VL regions from an antibody selected from the group consisting of GS-9723, GS-5423, 3BNC117, VRC07 and VRC07-523. In some embodiments, the pharmaceutical composition comprises: (i) a multi-specific (e.g. bispecific) antigen binding molecule comprising a EC domain of CD4, as described herein; (ii) an antibody or multi-specific antigen binding molecule that competes with or comprises VH and VL regions from an antibody selected from the group consisting of 10-1074, 10-1074-J, GS-9722 (elipovimab), GS-2872, PGT-121, PGT-121.66, PGT-121.414 and PGT-134; and (iii) an antibody or multi-specific antigen binding molecule that competes with or comprises VH and VL regions from an antibody selected from the group consisting of GS-9723, GS-5423, 3BNC117, VRC07 and VRC07-523. In some embodiments, the pharmaceutical composition comprises an additional multi-specific antigen binding molecule that competes with or comprises VH and VL regions from an antibody that binds to the gp120 second variable loop (V2) (e.g., Env trimer apex). In some embodiments, the pharmaceutical composition comprises an additional multi-specific antigen binding molecule that competes with or comprises VH and VL regions from an antibody selected from the group consisting of PG9, PG16, PGC14, PGG14, PGT-142, PGT-143, PGT-144, PGT-145, CH01, CH59, PGDM1400, CAP256, CAP256-VRC26.08, CAP256-VRC26.09, CAP256-VRC26.25, PCT64-24E and VRC38.01. In some embodiments, the pharmaceutical composition comprises an additional multi-specific antigen binding molecule that competes with or comprises VH and VL regions from an antibody that binds to the gp120/gp41 interface. In some embodiments, the pharmaceutical composition comprises an additional multi-specific antigen binding molecule that competes with or comprises VH and VL regions from an antibody selected from the group consisting of PGT-151, CAP248-2B, 35022, 8ANC195, ACS202, VRC34 and VRC34.01. In some embodiments, the pharmaceutical composition comprises an additional multi-specific antigen binding molecule that competes with or comprises VH and VL regions from an antibody that binds to an epitope or region of gp41 in the membrane proximal region (MPER). In some embodiments, the pharmaceutical composition comprises an additional multi-specific antigen binding molecule that competes with or comprises VH and VL regions from an antibody selected from the group consisting of 10E8, 10E8v4, 10E8-5R-100cF, 4E10, DH511.11P, 2F5, 7b2, and LN01. In some embodiments, the pharmaceutical composition comprises an additional antigen binding molecule or antigen binding fragment thereof that at least one of binds, inhibits, and neutralizes HIV, or a polynucleotide encoding the additional antigen binding molecule or antigen binding fragment thereof, wherein the additional antigen binding molecule or antigen binding fragment does not compete for binding to gp120 with the one or more multi-specific antigen binding molecules.

[0025] In a further aspect, provided is a kit comprising one or more containers comprising one or more of the multi-specific (e.g., bispecific) antigen binding molecules, the polynucleotide or polynucleotides, the lipoplex (e.g., LNP), or the pharmaceutical composition, as described herein. In some embodiments, the kit comprises one or more unitary doses of the one or more multi-specific antigen binding molecules, or the polynucleotide or polynucleotides, in one or more containers (e.g., one or more vials, ampules, syringes). In some embodiments, the kit comprises one or more unitary doses of the one or more multi-specific antigen binding molecules and a second agent for treating an HIV infection in separate containers. In some embodiments, the kit further comprises at least one of a toll-like receptor (TLR) agonist and an IL-15 receptor agonist. In some embodiments, the kit comprises a multi-specific antigen binding molecule having a first antigen binding domain that binds to CD3, and a second antigen binding domain that binds to an epitope or region of gp120 in the CD4 binding site (CD4bs) and comprises one or more extracellular (EC) domains of CD4, and optionally, an IL-15 receptor agonist. In some embodiments, the one or more EC domains of CD4 comprise a sequence as set forth in SEQ ID NOs: 746-749 (e.g., SEQ ID NO: 746), or a sequence that is at least 80%, at least 85%, at least 90%, at least 91%, at least 92%, at least 93%, at least 94%, at least 95%, at least 96%, at least 97%, at least 98%, or at least 99% identical to an amino acid sequence of SEQ ID NOs: 746-749 (e.g., SEQ ID NO: 746). In some embodiments, the EC domain of CD4 comprises a sequence that is at least 80%, at least 85%, at least 90%, at least 91%, at least 92%, at least 93%, at least 94%, at least 95%, at least 96%, at least 97%, at least 98%, or at least 99% identical to the sequence of SEQ ID NO: 746. In some embodiments, the EC domain of CD4 comprises a sequence that is at least 95% identical to the sequence of SEQ ID NO: 746. In some embodiments, the EC domain of CD4 comprises a sequence that is at least 99% identical to the sequence of SEQ ID NO: 746. In some embodiments, the EC domain of CD4 comprises the sequence of SEQ ID NO: 746. In some embodiments, the first antigen binding domain comprises a first VH-CDR1, a first VH-CDR2, a first VH-CDR3, a first VL-CDR1, a first VL-CDR2 and a first VL-CDR3 comprising the following amino acid sequences, respectively (according to Kabat): SEQ ID NOs: 1, 11, 8, 4, 9 and 10; or SEQ ID NOs: 1, 12, 8, 4, 9 and 10; and the second antigen binding domain comprises one or more EC domains of CD4 comprising an amino acid sequence that comprises or is at least 80%, at least 85%, at least 90%, at least 91%, at least 92%, at least 93%, at least 94%, at least 95%, at least 96%, at least 97%, at least 98%, or at least 99%, identical to a CD4 EC domain selected from the group consisting of SEQ ID NOs: 746-749 (e.g., SEQ ID NO: 746). In some embodiments, the first antigen binding domain comprises a first VH-CDR1, a first VH-CDR2, a first VH-CDR3, a first VL-CDR1, a first VL-CDR2 and a first VL-CDR3 comprising the following amino acid sequences, respectively (according to Chothia): SEQ ID NOs: 17, 18, 23, 20, 24 and 25; and the second antigen binding domain comprises one or more EC domains of CD4 comprising an amino acid sequence that comprises or is at least 80%, at least 85%, at least 90%, at least 91%, at least 92%, at least 93%, at least 94%, at least 95%, at least 96%, at least 97%, at least 98%, or at least 99%, identical to a CD4 EC domain selected from the group consisting of SEQ ID NOs: 746-749 (e.g., SEQ ID NO: 746). In some embodiments, the first antigen binding domain comprises a first VH-CDR1, a first VH-CDR2, a first VH-CDR3, a first VL-CDR1, a first VL-CDR2 and a first VL-CDR3 comprising the following amino acid sequences, respectively (according to IMGT): SEQ ID NOs: 28, 29, 32, 31, 24 and 10; and the second antigen binding domain comprises one or more EC domains of CD4 comprising an amino acid sequence that comprises or is at least 80%, at least 85%, at least 90%, at least 91%, at least 92%, at least 93%, at least 94%, at least 95%, at least 96%, at least 97%, at least 98%, or at least 99%, identical to a CD4 EC domain selected from the group consisting of SEQ ID NOs: 746-749 (e.g., SEQ ID NO: 746). In some embodiments, the first antigen binding domain comprises a first VH-CDR1, a first VH-CDR2, a first VH-CDR3, a first VL-CDR1, a first VL-CDR2 and a first VL-CDR3 comprising the following amino acid sequences, respectively (according to Honegger): SEQ ID NOs: 34, 42, 40, 37, 41 and 25; or SEQ ID NOs: 34, 43, 40, 37, 41 and 25; and the second antigen binding domain comprises one or more EC domains of CD4 comprising an amino acid sequence that comprises or is at least 80%, at least 85%, at least 90%, at least 91%, at least 92%, at least 93%, at least 94%, at least 95%, at least 96%, at least 97%, at least 98%, or at least 99%, identical to a CD4 EC domain selected from the group consisting of SEQ ID NOs: 746-749 (e.g., SEQ ID NO: 746). In some embodiments, the first antigen binding domain comprises a first VH and a first VL comprising the amino acid sequences set forth, respectively, or comprising amino acid sequences that are at least 80%, at least 85%, at least 90%, at least 91%, at least 92%, at least 93%, at least 94%, at least 95%, at least 96%, at least 97%, at least 98%, or at least 99% identical to the amino acid sequences set forth, respectively: SEQ ID NOs: 49 and 55; SEQ ID NOs: 50 and 55; SEQ ID NOs: 50 and 56; SEQ ID NOs: 51 and 55; or SEQ ID NOs: 51 and 56; and the second antigen binding domain comprises one or more EC domains of CD4 comprising an amino acid sequence that comprises or is at least 80%, at least 85%, at least 90%, at least 91%, at least 92%, at least 93%, at least 94%, at least 95%, at least 96%, at least 97%, at least 98%, or at least 99%, identical to a CD4 EC domain selected from the group consisting of SEQ ID NOs: 746-749 (e.g., SEQ ID NO: 746). In some embodiments, the TLR agonist is a TLR2 agonist, a TLR3 agonist, a TLR7 agonist, a TLR8 agonist or a TLR9 agonist. In some embodiments, the TLR7 agonist is selected from the group consisting of vesatolimod, imiquimod, and resiquimod. In some embodiments, the kit comprises a first multi-specific antigen binding molecule and second or additional antigen binding molecules, wherein the first multi-specific antigen binding molecule and the second or additional antigen binding molecules bind to different epitopes or regions of gp120 selected from the group consisting of: (i) the third variable loop (V3) (e.g., high mannose patch) comprising a N332 oligomannose glycan; (ii) the second variable loop (V2) (e.g., Env trimer apex); (iii) the CD4 binding site (CD4bs); (iv) the gp120/gp41 interface; or (v) the silent face of gp120. In some embodiments, the first multi-specific antigen binding molecule binds to the third variable loop (V3) (e.g., high mannose patch) comprising a N332 oligomannose glycan and the second or additional antigen binding molecules bind to the CD4 binding site (CD4bs). In some embodiments, the first multi-specific antigen binding molecule competes with or comprises VH and VL regions from an antibody selected from the group consisting of GS-9722 (elipovimab), GS-2872, PGT-121, PGT-121.66, PGT-121.414, PGT-122, PGT-123, PGT-124, PGT-125, PGT-126, PGT-128, PGT-130, PGT-133, PGT-134, PGT-135, PGT-136, PGT-137, PGT-138, PGT-139, 10-1074, VRC24, 2G12, BG18, 354BG8, 354BG18, 354BG42, 354BG33, 354BG129, 354BG188, 354BG411, 354BG426, DH270.1, DH270.6, PGDM12, VRC41.01, PGDM21, PCDN-33A, BF520.1 and VRC29.03, and the second or additional antigen binding molecules compete with or comprise VH and VL regions from an antibody selected from the group consisting of GS-9723, GS-5423, 3BNC117, 3BNC60, b12, F105, VRC01, VRC07, VRC07-523, VRC03, VRC06, VRC06b01 VRC08, VRC0801, NIH45-46, PGV04 (a.k.a., VRC-PG04); CH103, 44-VRC13.01, 1NC9, 12A12, N6, 1-18, N49-P7, NC-Cow1, IOMA, CH235 and CH235.12, N49P6, N49P7, N49P11, N49P9 and N60P25. In some embodiments, the first multi-specific antigen binding molecule competes with or comprises VH and VL regions from an antibody selected from the group consisting of 10-1074, 10-1074-J, GS-9722 (elipovimab), GS-2872, PGT-121, PGT-121.66, PGT-121.414 and PGT-134, and the second or additional antigen binding molecules compete with or comprise VH and VL regions from an antibody selected from the group consisting of GS-9723, GS-5423, 3BNC117, VRC07 and VRC07-523. In some embodiments, the first multi-specific antigen binding molecule competes with or comprises VH and VL regions from an antibody selected from the group consisting of 10-1074, 10-1074-J, GS-9722 and PGT-121, and the second or additional antigen binding molecules comprise an EC domain of CD4. In some embodiments, the first multi-specific antigen binding molecule binds to the CD4 binding site (CD4bs) and the second or additional antigen binding molecules bind to the third variable loop (V3) (e.g., high mannose patch) comprising a N332 oligomannose glycan. In some embodiments, the first multi-specific antigen binding molecule competes with or comprises VH and VL regions from an antibody selected from the group consisting of GS-9723, GS-5423, 3BNC117, 3BNC60, b12, F105, VRC01, VRC07, VRC07-523, VRC03, VRC06, VRC06b01 VRC08, VRC0801, NIH45-46, PGV04 (a.k.a., VRC-PG04); CH103, 44-VRC13.01, 1NC9, 12A12, N6, 1-18, N49-P7, NC-Cow1, IOMA, CH235 and CH235.12, N49P6, N49P7, N49P11, N49P9 and N60P25, and the second or additional antigen binding molecules compete with or comprise VH and VL regions from an antibody selected from the group consisting of GS-9722 (elipovimab), GS-2872, PGT-121, PGT-121.66, PGT-121.414, PGT-122, PGT-123, PGT-124, PGT-125, PGT-126, PGT-128, PGT-130, PGT-133, PGT-134, PGT-135, PGT-136, PGT-137, PGT-138, PGT-139, 10-1074, VRC24, 2G12, BG18, 354BG8, 354BG18, 354BG42, 354BG33, 354BG129, 354BG188, 354BG411, 354BG426, DH270.1, DH270.6, PGDM12, VRC41.01, PGDM21, PCDN-33A, BF520.1 and VRC29.03. In some embodiments, the first multi-specific antigen binding molecule competes with or comprises VH and VL regions from an antibody selected from the group consisting of GS-9723, GS-5423, 3BNC117, VRC07 and VRC07-523, and the second or additional antigen binding molecules compete with or comprise VH and VL regions from an antibody selected from the group consisting of 10-1074, 10-1074-J, GS-9722 (elipovimab), GS-2872, PGT-121, PGT-121.66, PGT-121.414 and PGT-134. In some embodiments, the first multi-specific antigen binding molecule competes with or comprises an EC domain of CD4, and the second or additional antigen binding molecules compete with or comprise VH and VL regions from an antibody selected from the group consisting of GS-9722 (elipovimab), GS-2872, PGT-121, PGT-121.66, PGT-121.414, PGT-122, PGT-123, PGT-124, PGT-125, PGT-126, PGT-128, PGT-130, PGT-133, PGT-134, PGT-135, PGT-136, PGT-137, PGT-138, PGT-139, 10-1074, VRC24, 2G12, BG18, 354BG8, 354BG18, 354BG42, 354BG33, 354BG129, 354BG188, 354BG411, 354BG426, DH270.1, DH270.6, PGDM12, VRC41.01, PGDM21, PCDN-33A, BF520.1 and VRC29.03. In some embodiments, the first multi-specific antigen binding molecule competes with or comprises an EC domain of CD4, and the second or additional antigen binding molecules compete with or comprise VH and VL regions from an antibody selected from the group consisting of 10-1074, 10-1074-J, GS-9722 (elipovimab), GS-2872, PGT-121, PGT-121.66, PGT-121.414 and PGT-134. In some embodiments, the kits further comprise second or additional antigen binding molecules compete with or comprise VH and VL regions from an antibody selected from the group consisting of GS-9723, GS-5423, 3BNC117, 3BNC60, b12, F105, VRC01, VRC07, VRC07-523, VRC03, VRC06, VRC06b01 VRC08, VRC0801, NIH45-46, PGV04 (a.k.a., VRC-PG04); CH103, 44-VRC13.01, 1NC9, 12A12, N6, 1-18, N49-P7, NC-Cow1, IOMA, CH235 and CH235.12, N49P6, N49P7, N49P11, N49P9 and N60P25. In some embodiments, the kits further comprise second or additional antigen binding molecules compete with or comprise VH and VL regions from an antibody selected from the group consisting of GS-9723, GS-5423, 3BNC117, VRC07 and VRC07-523. In some embodiments, the kit comprises: (i) a multi-specific antigen binding molecule comprising a EC domain of CD4, described herein; (ii) an antibody or multi-specific antigen binding molecule that competes with or comprises VH and VL regions from an antibody selected from the group consisting of 10-1074, 10-1074-J, GS-9722 (elipovimab), GS-2872, PGT-121, PGT-121.66, PGT-121.414 and PGT-134; and (iii) an antibody or multi-specific antigen binding molecule that competes with or comprises VH and VL regions from an antibody selected from the group consisting of GS-9723, GS-5423, 3BNC117, VRC07 and VRC07-523. In some embodiments, the kit comprises two or more unitary doses, wherein the unitary doses are the same or different.

[0026] In a further aspect, provided are methods of producing a multi-specific (e.g., bispecific) antigen binding molecule, described herein. In some embodiments, the methods of producing comprises: (a) culturing a cell or population of cells, described herein, transformed with the polynucleotide or polynucleotides, described herein, or the expression cassette or multiple expression cassettes, described herein, in a cell culture under conditions sufficient to express the multi-specific antigen binding molecules; and (b) isolating or purifying the antigen binding molecules from the cell culture. In some embodiments, the first antigen binding domain is a scFv and the second antigen binding domain is a Fab. In some embodiments, the first antigen binding domain is a Fab and the second antigen binding domain is a Fab or an EC domain of CD4. In some embodiments, the first antigen binding domain is a Fab and the second antigen binding domain is an EC domain of CD4. In some embodiments, the polypeptide comprising the first antigen binding domain and the polypeptide comprising the second antigen binding domain are expressed and assembled in the same cell. In some embodiments, the isolating or purifying step comprises Protein A affinity chromatography. In some embodiments, at least 90%, 91%, 92%, 93%, 94%, 95%, 96%, 97%, 98%, 99%, or more, of the multi-specific antigen binding molecules are isolated or purified. In some embodiments, the isolating or purifying step further comprises ion exchange chromatography. In some embodiments, at least 95%, 96%, 97%, 98%, 99%, or more, of the multi-specific antigen binding molecules are isolated or purified. In some embodiments, at least 95%, 96%, 97%, 98%, 99%, or more, of the multi-specific antigen binding molecules isolate or purify as non-aggregated soluble heterodimer as determined using size exclusion chromatography (SEC). In some embodiments, the isolated or purified multi-specific antigen binding molecules have increased homogeneity as assessed by analytical ion exchange chromatography, wherein the integrated area of a main peak representing an unmodified target species is at least 95%, 96%, 97%, 98%, or more, of the sum of all integrated protein peak areas. In some embodiments, the isolated or purified antigen binding molecules have fewer than 35%, 30%, 25%, 20%, 15%, 10%, 9%, 8%, 7%, or fewer, acidic contaminants. In some embodiments, the cell or population of cells are cultured in a culture volume of at least 2L, e.g., at least 5L, 10L, 50L, 100L, 150L, 200L, 250L, or more. In some embodiments, the methods further comprise formulating the antigen binding molecule into a sterile pharmaceutical composition suitable for administration to a human subject.

[0027] In another aspect, provided are methods of treating or preventing HIV in a human subject in need thereof. In some embodiments, the methods comprise administering to the subject an effective amount of one or more multi-specific (e.g., bispecific) antigen binding molecules, described herein, or the pharmaceutical composition, described herein. In a related aspect, provided are methods of preventing or treating an HIV infection or an HIV-related disease. In some embodiments, the methods comprises the steps of: identifying a patient in need of such prevention or treatment, and administering to said patient a first therapeutic agent comprising a therapeutically effective amount of at least one multi-specific (e.g., bispecific) antigen binding molecules, described herein, or the pharmaceutical composition, described herein. In some embodiments, the methods further comprise administering to the subject a second agent for treating an HIV infection. In some embodiments, the subject is not receiving antiretroviral therapy (ART) or ART is discontinued prior to administration of the one or more multi-specific antigen binding molecules. In some embodiments, ART is discontinued after one or more administrations of the one or more multi-specific antigen binding molecules. In some embodiments, the methods further comprise administering one or more antiretroviral therapy (ART) agents to the subject. In some embodiments, the methods further comprise administering to the subject at least one of a TLR agonist and an IL-15 receptor agonist. In some embodiments, the method comprises administering a multi-specific antigen binding molecule having a first antigen binding domain that binds to CD3, and a second antigen binding domain that binds to an epitope or region of gp120 in the CD4 binding site (CD4bs) and comprises one or more extracellular (EC) domains of CD4, and optionally, an IL-15 receptor agonist. In some embodiments, the one or more EC domains of CD4 comprise a sequence as set forth in SEQ ID NOs: 746-749 (e.g., SEQ ID NO: 746), or a sequence that is at least 80%, at least 85%, at least 90%, at least 91%, at least 92%, at least 93%, at least 94%, at least 95%, at least 96%, at least 97%, at least 98%, or at least 99% identical to an amino acid sequence of SEQ ID NOs: 746-749 (e.g., SEQ ID NO: 746). In some embodiments, the EC domain of CD4 comprises a sequence that is at least 80%, at least 85%, at least 90%, at least 91%, at least 92%, at least 93%, at least 94%, at least 95%, at least 96%, at least 97%, at least 98%, or at least 99% identical to the sequence of SEQ ID NO: 746. In some embodiments, the EC domain of CD4 comprises a sequence that is at least 95% identical to the sequence of SEQ ID NO: 746. In some embodiments, the EC domain of CD4 comprises a sequence that is at least 99% identical to the sequence of SEQ ID NO: 746. In some embodiments, the EC domain of CD4 comprises the sequence of SEQ ID NO: 746. In some embodiments, the first antigen binding domain comprises a first VH-CDR1, a first VH-CDR2, a first VH-CDR3, a first VL-CDR1, a first VL-CDR2 and a first VL-CDR3 comprising the following amino acid sequences, respectively (according to Kabat): SEQ ID NOs: 1, 11, 8, 4, 9 and 10; or SEQ ID NOs: 1, 12, 8, 4, 9 and 10; and the second antigen binding domain comprises one or more EC domains of CD4 comprising an amino acid sequence that comprises or is at least 80%, at least 85%, at least 90%, at least 91%, at least 92%, at least 93%, at least 94%, at least 95%, at least 96%, at least 97%, at least 98%, or at least 99%, identical to a CD4 EC domain selected from the group consisting of SEQ ID NOs: 746-749 (e.g., SEQ ID NO: 746). In some embodiments, the first antigen binding domain comprises a first VH-CDR1, a first VH-CDR2, a first VH-CDR3, a first VL-CDR1, a first VL-CDR2 and a first VL-CDR3 comprising the following amino acid sequences, respectively (according to Chothia): SEQ ID NOs: 17, 18, 23, 20, 24 and 25; and the second antigen binding domain comprises one or more EC domains of CD4 comprising an amino acid sequence that comprises or is at least 80%, at least 85%, at least 90%, at least 91%, at least 92%, at least 93%, at least 94%, at least 95%, at least 96%, at least 97%, at least 98%, or at least 99%, identical to a CD4 EC domain selected from the group consisting of SEQ ID NOs: 746-749 (e.g., SEQ ID NO: 746). In some embodiments, the first antigen binding domain comprises a first VH-CDR1, a first VH-CDR2, a first VH-CDR3, a first VL-CDR1, a first VL-CDR2 and a first VL-CDR3 comprising the following amino acid sequences, respectively (according to IMGT): SEQ ID NOs: 28, 29, 32, 31, 24 and 10; and the second antigen binding domain comprises one or more EC domains of CD4 comprising an amino acid sequence that comprises or is at least 80%, at least 85%, at least 90%, at least 91%, at least 92%, at least 93%, at least 94%, at least 95%, at least 96%, at least 97%, at least 98%, or at least 99%, identical to a CD4 EC domain selected from the group consisting of SEQ ID NOs: 746-749 (e.g., SEQ ID NO: 746). In some embodiments, the first antigen binding domain comprises a first VH-CDR1, a first VH-CDR2, a first VH-CDR3, a first VL-CDR1, a first VL-CDR2 and a first VL-CDR3 comprising the following amino acid sequences, respectively (according to Honegger): SEQ ID NOs: 34, 42, 40, 37, 41 and 25; or SEQ ID NOs: 34, 43, 40, 37, 41 and 25; and the second antigen binding domain comprises one or more EC domains of CD4 comprising an amino acid sequence that comprises or is at least 80%, at least 85%, at least 90%, at least 91%, at least 92%, at least 93%, at least 94%, at least 95%, at least 96%, at least 97%, at least 98%, or at least 99%, identical to a CD4 EC domain selected from the group consisting of SEQ ID NOs: 746-749 (e.g., SEQ ID NO: 746). In some embodiments, the first antigen binding domain comprises a first VH and a first VL comprising the amino acid sequences set forth, respectively, or comprising amino acid sequences that are at least 80%, at least 85%, at least 90%, at least 91%, at least 92%, at least 93%, at least 94%, at least 95%, at least 96%, at least 97%, at least 98%, or at least 99% identical to the amino acid sequences set forth, respectively: SEQ ID NOs: 49 and 55; SEQ ID NOs: 50 and 55; SEQ ID NOs: 50 and 56; SEQ ID NOs: 51 and 55; or SEQ ID NOs: 51 and 56; and the second antigen binding domain comprises one or more EC domains of CD4 comprising an amino acid sequence that comprises or is at least 80%, at least 85%, at least 90%, at least 91%, at least 92%, at least 93%, at least 94%, at least 95%, at least 96%, at least 97%, at least 98%, or at least 99%, identical to a CD4 EC domain selected from the group consisting of SEQ ID NOs: 746-749 (e.g., SEQ ID NO: 746). In some embodiments, the TLR agonist is a TLR2 agonist, a TLR3 agonist, a TLR7 agonist, a TLR8 agonist or a TLR9 agonist. In some embodiments, the TLR7 agonist is selected from the group consisting of vesatolimod, imiquimod, and resiquimod. In some embodiments, the method comprises administering a first multi-specific antigen binding molecule and second or additional antigen binding molecules, wherein the first multi-specific antigen binding molecule and the second or additional antigen binding molecules bind to different epitopes or regions of gp120 selected from the group consisting of: (i) the third variable loop (V3) (e.g., high mannose patch) comprising a N332 oligomannose glycan; (ii) the second variable loop (V2) (e.g., Env trimer apex); (iii) the CD4 binding site (CD4bs); (iv) the gp120/gp41 interface; or (v) the silent face of gp120. In some embodiments, the first multi-specific antigen binding molecule binds to the third variable loop (V3) (e.g., high mannose patch) comprising a N332 oligomannose glycan and the second or additional antigen binding molecules bind to the CD4 binding site (CD4bs). In some embodiments, the first multi-specific antigen binding molecule competes with or comprises VH and VL regions from an antibody selected from the group consisting of 10-1074, 10-1074-J, GS-9722 (elipovimab), GS-2872, PGT-121, PGT-121.66, PGT-121.414, PGT-122, PGT-123, PGT-124, PGT-125, PGT-126, PGT-128, PGT-130, PGT-133, PGT-134, PGT-135, PGT-136, PGT-137, PGT-138, PGT-139, VRC24, 2G12, BG18, 354BG8, 354BG18, 354BG42, 354BG33, 354BG129, 354BG188, 354BG411, 354BG426, DH270.1, DH270.6, PGDM12, VRC41.01, PGDM21, PCDN-33A, BF520.1 and VRC29.03, and the second or additional antigen binding molecules compete with or comprise VH and VL regions from an antibody selected from the group consisting of GS-9723, GS-5423, 3BNC117, 3BNC60, b12, F105, VRC01, VRC07, VRC07-523, VRC03, VRC06, VRC06b01 VRC08, VRC0801, NIH45-46, PGV04 (a.k.a., VRC-PG04); CH103, 44-VRC13.01, 1NC9, 12A12, N6, 1-18, N49-P7, NC-Cow1, IOMA, CH235 and CH235.12, N49P6, N49P7, N49P11, N49P9 and N60P25. In some embodiments, the first multi-specific antigen binding molecule competes with or comprises VH and VL regions from an antibody selected from the group consisting of 10-1074, 10-1074-J, GS-9722 (elipovimab), GS-2872, PGT-121, PGT-121.66, PGT-121.414 and PGT-134, and the second or additional antigen binding molecules compete with or comprise VH and VL regions from GS-9723, GS-5423, 3BNC117, VRC07 and VRC07-523. In some embodiments, the first multi-specific antigen binding molecule competes with or comprises VH and VL regions from an antibody selected from the group consisting of 10-1074, 10-1074-J, GS-9722 (elipovimab), GS-2872, PGT-121, PGT-121.66, PGT-121.414 and PGT-134, and the second or additional antigen binding molecules comprise an EC domain of CD4. In some embodiments, the first multi-specific antigen binding molecule binds to the CD4 binding site (CD4bs) and the second or additional antigen binding molecules bind to the third variable loop (V3) (e.g., high mannose patch) comprising a N332 oligomannose glycan. In some embodiments, the first multi-specific antigen binding molecule competes with or comprises VH and VL regions from an antibody selected from the group consisting of GS-9723, GS-5423, 3BNC117, 3BNC60, b12, F105, VRC01, VRC07, VRC07-523, VRC03, VRC06, VRC06b01 VRC08, VRC0801, NIH45-46, PGV04 (a.k.a., VRC-PG04); CH103, 44-VRC13.01, 1NC9, 12A12, N6, 1-18, N49-P7, NC-Cow1, IOMA, CH235 and CH235.12, N49P6, N49P7, N49P11, N49P9 and N60P25, and the second or additional antigen binding molecules compete with or comprise VH and VL regions from an antibody selected from the group consisting of GS-9722 (elipovimab), GS-2872, PGT-121, PGT-121.66, PGT-121.414, PGT-122, PGT-123, PGT-124, PGT-125, PGT-126, PGT-128, PGT-130, PGT-133, PGT-134, PGT-135, PGT-136, PGT-137, PGT-138, PGT-139, 10-1074, 10-1074-J, VRC24, 2G12, BG18, 354BG8, 354BG18, 354BG42, 354BG33, 354BG129, 354BG188, 354BG411, 354BG426, DH270.1, DH270.6, PGDM12, VRC41.01, PGDM21, PCDN-33A, BF520.1 and VRC29.03. In some embodiments, the first multi-specific antigen binding molecule competes with or comprises VH and VL regions from an antibody selected from the group consisting of GS-9723, GS-5423, 3BNC117, VRC07 and VRC07-523, and the second or additional antigen binding molecules compete with or comprise VH and VL regions from 10-1074, 10-1074-J, GS-9722 (elipovimab), GS-2872, PGT-121, PGT-121.66, PGT-121.414 and PGT-134. In some embodiments, the first multi-specific antigen binding molecule competes with or comprises an EC domain of CD4, and the second or additional antigen binding molecules compete with or comprise VH and VL regions from an antibody selected from the group consisting of GS-9722 (elipovimab), GS-2872, PGT-121, PGT-121.66, PGT-121.414, PGT-122, PGT-123, PGT-124, PGT-125, PGT-126, PGT-128, PGT-130, PGT-133, PGT-134, PGT-135, PGT-136, PGT-137, PGT-138, PGT-139, 10-1074, 10-1074-J, VRC24, 2G12, BG18, 354BG8, 354BG18, 354BG42, 354BG33, 354BG129, 354BG188, 354BG411, 354BG426, DH270.1, DH270.6, PGDM12, VRC41.01, PGDM21, PCDN-33A, BF520.1 and VRC29.03. In some embodiments, the first multi-specific antigen binding molecule competes with or comprises an EC domain of CD4, and the second or additional antigen binding molecules compete with or comprise VH and VL regions from an antibody selected from the group consisting of 10-1074, 10-1074-J, GS-9722 (elipovimab), GS-2872, PGT-121, PGT-121.66, PGT-121.414 and PGT-134. In some embodiments, the method further comprises administering second or additional antigen binding molecules compete with or comprise VH and VL regions from an antibody selected from the group consisting of GS-9723, GS-5423, 3BNC117, 3BNC60, b12, F105, VRC01, VRC07, VRC07-523, VRC03, VRC06, VRC06b01 VRC08, VRC0801, NIH45-46, PGV04 (a.k.a., VRC-PG04); CH103, 44-VRC13.01, 1NC9, 12A12, N6, 1-18, N49-P7, NC-Cow1, IOMA, CH235 and CH235.12, N49P6, N49P7, N49P11, N49P9 and N60P25. In some embodiments, the method further comprises administering second or additional antigen binding molecules compete with or comprise VH and VL regions from an antibody selected from the group consisting of GS-9723, GS-5423, 3BNC117, VRC07 and VRC07-523. In some embodiments, the methods comprise co-administering: (i) a multi-specific antigen binding molecule comprising a EC domain of CD4, described herein; (ii) an antibody or multi-specific antigen binding molecule that competes with or comprises VH and VL regions from an antibody selected from the group consisting of 10-1074, 10 1074-J, GS-9722 (elipovimab), GS-2872, PGT-121, PGT-121.66, PGT-121.414 and PGT-134; and (iii) an antibody or multi-specific antigen binding molecule that competes with or comprises VH and VL regions from an antibody selected from the group consisting of GS-9723, GS 5423, 3BNC117, VRC07 and VRC07-523. In some embodiments, the methods further comprise administering to the human subject an additional antigen binding molecule or antigen binding fragment thereof that at least one of binds, inhibits, and neutralizes HIV or a polynucleotide encoding the additional antigen binding molecule or antigen binding fragment thereof. In some embodiments, the method comprises administering an antibody or multi-specific antigen binding molecule that competes with or comprises VH and VL regions that bind to the gp120 third variable loop (V3) (e.g., high mannose patch) comprising a N332 oligomannose glycan, and the human subject is infected with an HIV expressing a gp120 comprising the following amino acid residues, wherein the positions and residues are with reference to SEQ ID NO:69: N332glycan, D325 and T63; N332glycan, D325 and L179; N332glycan, D325 and T320; N332glycan, D325 and H330; N332glycan, D325, T63 and L179; N332glycan, D325, T63 and T320; N332glycan, D325, T63 and H330; N332glycan, D325, L179 and T320; N332glycan, D325, L179 and H330; N332glycan, D325, T320 and H330; N332glycan, D325, T63, T320 and H330; N332glycan, D325, T63, L179 and T320; N332glycan, D325, T63, L179 and H330; N332glycan, D325, L179, T320 and H330; or N332glycan, D325, T63, L179, T320 and H330. In some embodiments, the method comprises administering an antibody or multi-specific antigen binding molecule that competes with or comprises VH and VL regions that bind to the gp120 CD4 binding site, and wherein the human subject is infected with an HIV expressing a gp120 comprising the following amino acid residues, wherein the positions and residues are with reference to SEQ ID NO:73: I201 and F353; I201, I108 and F353; I201, I108, A281 and F353; I201, E102, I108, A281 and F353; or I201, E102, I108, A281, Y318 and F353. In some embodiments, the method entails multiple administrations of the one or more multi-specific antigen binding molecules, optionally with a TLR agonist or an IL-15 receptor agonist, at predetermined intervals. In some embodiments, the method comprises administering a multi-specific antigen binding molecule having a first antigen binding domain that binds to CD3, and a second antigen binding domain that binds to an epitope or region of gp120 in the CD4 binding site (CD4bs) and comprises one or more extracellular (EC) domains of CD4, and optionally, an IL-15 receptor agonist, wherein the multi-specific antigen binding molecule and the IL-15 receptor agonist are administered independently at predetermined intervals. In some embodiments, the one or more EC domains of CD4 comprise a sequence as set forth in SEQ ID NOs: 746-749, or a sequence that is at least 80%, at least 85%, at least 90%, at least 91%, at least 92%, at least 93%, at least 94%, at least 95%, at least 96%, at least 97%, at least 98%, or at least 99% identical to an amino acid sequence of SEQ ID NOs: 746-749 (e.g., SEQ ID NO: 746). In some embodiments, the first antigen binding domain comprises a first VH-CDR1, a first VH-CDR2, a first VH-CDR3, a first VL-CDR1, a first VL-CDR2 and a first VL-CDR3 comprising the following amino acid sequences, respectively (according to Kabat): SEQ ID NOs: 1, 11, 8, 4, 9 and 10; or SEQ ID NOs: 1, 12, 8, 4, 9 and 10; and the second antigen binding domain comprises one or more EC domains of CD4 comprising an amino acid sequence that comprises or is at least 80%, at least 85%, at least 90%, at least 91%, at least 92%, at least 93%, at least 94%, at least 95%, at least 96%, at least 97%, at least 98%, or at least 99%, identical to a CD4 EC domain selected from the group consisting of SEQ ID NOs: 746-749 (e.g., SEQ ID NO: 746). In some embodiments, the first antigen binding domain comprises a first VH-CDR1, a first VH-CDR2, a first VH-CDR3, a first VL-CDR1, a first VL-CDR2 and a first VL-CDR3 comprising the following amino acid sequences, respectively (according to Chothia): SEQ ID NOs: 17, 18, 23, 20, 24 and 25; and the second antigen binding domain comprises one or more EC domains of CD4 comprising an amino acid sequence that comprises or is at least 80%, at least 85%, at least 90%, at least 91%, at least 92%, at least 93%, at least 94%, at least 95%, at least 96%, at least 97%, at least 98%, or at least 99%, identical to a CD4 EC domain selected from the group consisting of SEQ ID NOs: 746-749 (e.g., SEQ ID NO: 746). In some embodiments, the first antigen binding domain comprises a first VH-CDR1, a first VH-CDR2, a first VH-CDR3, a first VL-CDR1, a first VL-CDR2 and a first VL-CDR3 comprising the following amino acid sequences, respectively (according to IMGT): SEQ ID NOs: 28, 29, 32, 31, 24 and 10; and the second antigen binding domain comprises one or more EC domains of CD4 comprising an amino acid sequence that comprises or is at least 80%, at least 85%, at least 90%, at least 91%, at least 92%, at least 93%, at least 94%, at least 95%, at least 96%, at least 97%, at least 98%, or at least 99%, identical to a CD4 EC domain selected from the group consisting of SEQ ID NOs: 746-749 (e.g., SEQ ID NO: 746). In some embodiments, the first antigen binding domain comprises a first VH-CDR1, a first VH-CDR2, a first VH-CDR3, a first VL-CDR1, a first VL-CDR2 and a first VL-CDR3 comprising the following amino acid sequences, respectively (according to Honegger): SEQ ID NOs: 34, 42, 40, 37, 41 and 25; or SEQ ID NOs: 34, 43, 40, 37, 41 and 25; and the second antigen binding domain comprises one or more EC domains of CD4 comprising an amino acid sequence that comprises or is at least 80%, at least 85%, at least 90%, at least 91%, at least 92%, at least 93%, at least 94%, at least 95%, at least 96%, at least 97%, at least 98%, or at least 99%, identical to a CD4 EC domain selected from the group consisting of SEQ ID NOs: 746-749 (e.g., SEQ ID NO: 746). In some embodiments, the first antigen binding domain comprises a first VH and a first VL comprising the amino acid sequences set forth, respectively, or comprising amino acid sequences that are at least 80%, at least 85%, at least 90%, at least 91%, at least 92%, at least 93%, at least 94%, at least 95%, at least 96%, at least 97%, at least 98%, or at least 99% identical to the amino acid sequences set forth, respectively: SEQ ID NOs: 49 and 55; SEQ ID NOs: 50 and 55; SEQ ID NOs: 50 and 56; SEQ ID NOs: 51 and 55; or SEQ ID NOs: 51 and 56; and the second antigen binding domain comprises one or more EC domains of CD4 comprising an amino acid sequence that comprises or is at least 80%, at least 85%, at least 90%, at least 91%, at least 92%, at least 93%, at least 94%, at least 95%, at least 96%, at least 97%, at least 98%, or at least 99%, identical to a CD4 EC domain selected from the group consisting of SEQ ID NOs: 746-749 (e.g., SEQ ID NO: 746). In some embodiments, the subject is chronically infected with HIV. In some embodiments, the one or more multi-specific antigen binding molecules, the polynucleotide, the vector, the LNP and/or the pharmaceutical composition are administered systemically or locally. In some embodiments, the one or more multi-specific antigen binding molecules, the polynucleotide, the vector, the LNP and/or the pharmaceutical composition is administered via a route selected from intravenous, subcutaneous, intramuscular, intradermal and mucosal (e.g. buccal, intranasal, intrarectal, intravaginal). In some embodiments, the one or more multi-specific antigen binding molecules, the polynucleotide, the vector, the LNP and/or the pharmaceutical composition and the one or more additional therapeutic agents are administered by the same routes of administration. In some embodiments, the one or more multi-specific antigen binding molecules, the polynucleotide, the vector, the LNP and/or the pharmaceutical composition and the one or more additional therapeutic agents are administered by different routes of administration. In some embodiments, the one or more multi-specific antigen binding molecules, the polynucleotide, the vector, the LNP and/or the pharmaceutical composition and the one or more additional therapeutic agents are co-administered according to the same schedule (e.g., co-administered at the same time intervals). In some embodiments, the one or more multi-specific antigen binding molecules, the polynucleotide, the vector, the LNP and/or the pharmaceutical composition and the one or more additional therapeutic agents are co-administered according to different schedules (e.g., co-administered at different time intervals). In some embodiments, the one or more multi-specific antigen binding molecules, the polynucleotide, the vector, the LNP and/or the pharmaceutical composition is administered at a dose in the range of from 1 μg/kg to 5 μg/kg, e.g., from 350 μg/kg to 550 μg/kg, e.g., from 0.3 mg/kg to 30 mg/kg, e.g., from 2 mg/kg to 10 mg/kg, e.g., from 1 μg/kg up to 2 μg/kg, 3 μg/kg, 4 μg/kg, 5 μg/kg, 10 μg/kg, 50 μg/kg, 100 μg/kg, 250 μg/kg, 300 μg/kg, 350 μg/kg, 400 μg/kg, 410 μg/kg, 420 μg/kg, 430 μg/kg, 440 μg/kg, 450 μg/kg, 460 μg/kg, 470 μg/kg, 480 μg/kg, 490 μg/kg, 500 μg/kg, 750 μg/kg, 1 mg/kg, 1.5 mg/kg, 2 mg/kg, 2.5 mg/kg, 3 mg/kg, 3.5 mg/kg, 4 mg/kg, 4.5 mg/kg, 5 mg/kg, 6 mg/kg, 7 mg/kg, 8 mg/kg, 9 mg/kg, 10 mg/kg, 15 mg/kg, 20 mg/kg, 25 mg/kg, 30 mg/kg, 35 mg/kg, 40 mg/kg, 45 mg/kg, or 50 mg/kg, body weight per administration. In some embodiments, the one or more multi-specific antigen binding molecules, the polynucleotide, the vector, the LNP and/or the pharmaceutical composition is administered at a dose in the range of 0.05 mg to 1000 mg per administration, e.g., from 0.05 mg to 150 mg per administration, e.g., from 0.05 mg to 0.35 mg per administration, e.g., from 25 mg to 50 mg per administration, e.g., from 30 mg to 35 mg per administration, e.g., from 10 mg to 1000 mg per administration, e.g., from 50 mg to 1000 mg per administration, e.g., from 100 mg to 700 mg per administration, e.g., at least 0.05 mg up to 0.1 mg, 0.2 mg, 0.3 mg, 0.35 mg, 0.4 mg, 0.5 mg, 0.6 mg, 0.7 mg, 0.8 mg, 1.0 mg, 5 mg, 10 mg, 25 mg, 30 mg, 35 mg, 40 mg, 45 mg, 50 mg, 60 mg, 70 mg, 80 mg, 90 mg, 100 mg, 200 mg, 300 mg, 400 mg, 500 mg, 600 mg, 700 mg, 800 mg, 900 mg, or 1000 mg per administration. In some embodiments, the method entails multiple administrations of the one or more multi-specific antigen binding molecules, the polynucleotide, the vector, the LNP and/or the pharmaceutical composition, optionally with one or more additional therapeutic agents, at predetermined intervals. In some embodiments, the method entails administering over a time period of at least about 2 weeks, 3 weeks, 1 month, 6, weeks, 2 months, 10 weeks, 3 months, 4 months, 5 months, 6 months, 7 months, 8 months, 9 months, 10 months, 11 months, 12 months, 13 months, 14 months, 15 months, 16 months, 17 months, 18 months, 19 months, 20 months, 21 months, 22 months, 23 months, 24 months, or longer. In some embodiments, the method entails administering one or more times at predetermined intervals spaced at least 1 week and up to at least 2 weeks, 3 weeks, 1 month, 2 months, 3 months, 4 months, 5 months or 6 months apart. In some embodiments, the one or more multi-specific antigen binding molecules, the polynucleotide, the vector, the LNP and/or the pharmaceutical composition is administered once weekly (i.e., QW), once bi-weekly (i.e. once every other week, or once every two weeks or Q2W), once thrice-weekly (i.e. once every three weeks or Q3W), once monthly (i.e., QM) or once bi-monthly dosing (i.e. once every other month, or once every two months or Q2M), once every three months (Q3M), once every four months (Q4M), once every five months (Q5M), once every six months (Q6M), or less often. In some embodiments, the one or more multi-specific antigen binding molecules, the polynucleotide, the vector, the LNP and/or the pharmaceutical composition is administered two, three, four, five, or more, times intravenously or subcutaneously at an interval or at intervals between once bi-weekly (i.e. once every other week, or once every two weeks or Q2W) to once thrice-weekly (i.e. once every three weeks or Q3W). In some embodiments, the method entails the one or more multi-specific antigen binding molecules have a serum half-life in a human of at least 3 days, e.g., at least 4 days, at least 5 days, at least 6 days, at least 7 days, at least 8 days, at least 9 days, at least 10 days, at least 11 days, at least 12 days, at least 13 days, at least 14 days, at least 15 days, at least 16 days, or longer. In some embodiments, the subject or the mammal is a human. In some embodiments, the subject does not exhibit symptoms of HIV or AIDS in the absence of anti-retroviral treatment (ART) for at least 6 months, at least 1 year, at least 2 years, at least 3 years, or more. In some embodiments, the subject has a viral load of copies/ml blood of less than 500, e.g., less than 400, less than 300, less than 200, less than 100, less than 50, in the absence of anti-retroviral treatment (ART) for at least 6 months, at least 1 year, at least 2 years, at least 3 years, or more.

[0028] In a related aspect, provided are methods of treating or preventing HIV in a human subject in need thereof. In some embodiments, the methods comprise: (a) Identifying a human subject who is infected with an HIV expressing a gp120 comprising the following amino acid residues, wherein the positions and residues are with reference to SEQ ID NO:69: N332glycan, D325 and T63; N332glycan, D325 and L179; N332glycan, D325 and T320; N332glycan, D325 and H330; N332glycan, D325, T63 and L179; N332glycan, D325, T63 and T320; N332glycan, D325, T63 and H330; N332glycan, D325, L179 and T320; N332glycan, D325, L179 and H330; N332glycan, D325, T320 and H330; N332glycan, D325, T63, T320 and H330; N332glycan, D325, T63, L179 and T320; N332glycan, D325, T63, L179 and H330; N332glycan, D325, L179, T320 and H330; or N332glycan, D325, T63, L179, T320 and H330; and (b) Administering to the subject an effective amount of the multi-specific antigen binding molecule, described herein, or the pharmaceutical composition, described herein, wherein the second binding domain competes with or comprises VH and VL regions that bind to the third variable loop (V3) (e.g., high mannose patch) comprising a N332 oligomannose glycan. In some embodiments, the methods comprise identifying a subject infected with an HIV or a population of HIV expressing a gp120 comprising the following amino acid residues: N332glycan, D325 and T63; N332glycan, D325 and L179; N332glycan, D325 and T320; or N332glycan, D325 and H330. In some embodiments, the methods comprise identifying a subject infected with an HIV or a population of HIV expressing a gp120 comprising the following amino acid residues: N332glycan, D325, T63 and L179; N332glycan, D325, T63 and T320; N332glycan, D325, T63 and H330; N332glycan, D325, L179 and T320; N332glycan, D325, L179 and H330; or N332glycan, D325, T320 and H330. In some embodiments, the methods comprise identifying a subject infected with an HIV or a population of HIV expressing a gp120 comprising the following amino acid residues: N332glycan, D325, L179, T320 and H330; N332glycan, D325, T63, T320 and H330; N332glycan, D325, T63, L179 and T320; or N332glycan, D325, T63, L179 and H330. In some embodiments, the methods comprise identifying a subject infected with an HIV or a population of HIV expressing a gp120 comprising the following amino acid residues: N332glycan, D325, T63 and H330; N332glycan, D325, T320 and H330; N332glycan, D325, L179, T320 and H330; or N332glycan, D325, T63, L179, T320 and H330. In some embodiments, the second antigen binding domain competes with or comprises VH and VL regions from an antibody selected from the group consisting of 10-1074, 10-1074-J, GS-9722 (elipovimab), GS-9721, GS-2872, PGT-121, PGT-121.66, PGT-121.414, PGT-122, PGT-123, PGT-124, PGT-125, PGT-126, PGT-128, PGT-130, PGT-133, PGT-134, PGT-135, PGT-136, PGT-137, PGT-138, PGT-139, VRC24, 2G12, BG18, 354BG8, 354BG18, 354BG42, 354BG33, 354BG129, 354BG188, 354BG411, 354BG426, DH270.1, DH270.6, PGDM12, VRC41.01, PGDM21, PCDN-33A, BF520.1 and VRC29.03. In some embodiments, the second antigen binding domain competes with or comprises VH and VL regions from an antibody selected from the group consisting of 10-1074, 10-1074-J, GS-9722 (elipovimab), GS-9721, GS-2872, PGT-121, PGT-121.66, PGT-121.414 and PGT-134. In some embodiments, the method entails treating or preventing HIV in a human subject in need thereof, the method comprising: (a) Identifying a human subject who is infected with an HIV expressing a gp120 comprising the following amino acid residues, wherein the positions and residues are with reference to SEQ ID NO:73: (i) I201 and F353; (ii) I201, I108 and F353; (iii) I201, I108, A281 and F353; (iv) I201, E102, I108, A281 and F353; or (v) I201, E102, I108, A281, Y318 and F353; and (b) Administering to the subject an effective amount of the multi-specific antigen binding molecule, or the pharmaceutical composition as described herein, wherein the second binding domain competes with or comprises VH and VL regions that bind to the gp120 CD4 binding site (CD4bs). In some embodiments, the second antigen binding domain competes with or comprises VH and VL regions from an antibody selected from the group consisting of 3BNC117, GS-9723, GS-5423, 3BNC60, b12, F105, VRC01, VRC07, VRC07-523, VRC03, VRC06, VRC06b01 VRC08, VRC0801, NIH45-46, PGV04 (a.k.a., VRC-PG04); CH103, 44-VRC13.01, 1NC9, 12A12, N6, 1-18, N49-P7, NC-Cow1, IOMA, CH235 and CH235.12, N49P6, N49P7, N49P11, N49P9 and N60P25. In some embodiments, the second antigen binding domain competes with or comprises VH and VL regions from an antibody selected from the group consisting of 3BNC117, GS-9723, GS-5423, 3BNC60, VRC01, VRC07 and VRC07-523. In some embodiments, the methods further comprise administering to the subject a second agent for treating an HIV infection. In some embodiments, the subject is not receiving antiretroviral therapy (ART) or ART is discontinued prior to administration of the one or more multi-specific antigen binding molecules. In some embodiments, ART is discontinued after one or more administrations of the one or more multi-specific antigen binding molecules. In some embodiments, the methods further comprise administering one or more antiretroviral therapy (ART) agents to the subject. In some embodiments, the methods further comprise administering to the subject at least one of a TLR agonist and an IL-15 receptor agonist. In some embodiments, the method comprises administering a multi-specific antigen binding molecule having a first antigen binding domain that binds to CD3, and a second antigen binding domain that binds to an epitope or region of gp120 in the CD4 binding site (CD4bs) and comprises one or more extracellular (EC) domains of CD4, and optionally, an IL-15 receptor agonist. In some embodiments, the one or more EC domains of CD4 comprise a sequence as set forth in SEQ ID NOs: 746-749, or a sequence that is at least 80%, at least 85%, at least 90%, at least 91%, at least 92%, at least 93%, at least 94%, at least 95%, at least 96%, at least 97%, at least 98%, or at least 99% identical to an amino acid sequence of SEQ ID NOs: 746-749 (e.g., SEQ ID NO: 746). In some embodiments, the first antigen binding domain comprises a first VH-CDR1, a first VH-CDR2, a first VH-CDR3, a first VL-CDR1, a first VL-CDR2 and a first VL-CDR3 comprising the following amino acid sequences, respectively (according to Kabat): SEQ ID NOs: 1, 11, 8, 4, 9 and 10; or SEQ ID NOs: 1, 12, 8, 4, 9 and 10; and the second antigen binding domain comprises one or more EC domains of CD4 comprising an amino acid sequence that comprises or is at least 80%, at least 85%, at least 90%, at least 91%, at least 92%, at least 93%, at least 94%, at least 95%, at least 96%, at least 97%, at least 98%, or at least 99%, identical to a CD4 EC domain selected from the group consisting of SEQ ID NOs: 746-749 (e.g., SEQ ID NO: 746). In some embodiments, the first antigen binding domain comprises a first VH-CDR1, a first VH-CDR2, a first VH-CDR3, a first VL-CDR1, a first VL-CDR2 and a first VL-CDR3 comprising the following amino acid sequences, respectively (according to Chothia): SEQ ID NOs: 17, 18, 23, 20, 24 and 25; and the second antigen binding domain comprises one or more EC domains of CD4 comprising an amino acid sequence that comprises or is at least 80%, at least 85%, at least 90%, at least 91%, at least 92%, at least 93%, at least 94%, at least 95%, at least 96%, at least 97%, at least 98%, or at least 99%, identical to a CD4 EC domain selected from the group consisting of SEQ ID NOs: 746-749 (e.g., SEQ ID NO: 746). In some embodiments, the first antigen binding domain comprises a first VH-CDR1, a first VH-CDR2, a first VH-CDR3, a first VL-CDR1, a first VL-CDR2 and a first VL-CDR3 comprising the following amino acid sequences, respectively (according to IMGT): SEQ ID NOs: 28, 29, 32, 31, 24 and 10; and the second antigen binding domain comprises one or more EC domains of CD4 comprising an amino acid sequence that comprises or is at least 80%, at least 85%, at least 90%, at least 91%, at least 92%, at least 93%, at least 94%, at least 95%, at least 96%, at least 97%, at least 98%, or at least 99%, identical to a CD4 EC domain selected from the group consisting of SEQ ID NOs: 746-749 (e.g., SEQ ID NO: 746). In some embodiments, the first antigen binding domain comprises a first VH-CDR1, a first VH-CDR2, a first VH-CDR3, a first VL-CDR1, a first VL-CDR2 and a first VL-CDR3 comprising the following amino acid sequences, respectively (according to Honegger): SEQ ID NOs: 34, 42, 40, 37, 41 and 25; or SEQ ID NOs: 34, 43, 40, 37, 41 and 25; and the second antigen binding domain comprises one or more EC domains of CD4 comprising an amino acid sequence that comprises or is at least 80%, at least 85%, at least 90%, at least 91%, at least 92%, at least 93%, at least 94%, at least 95%, at least 96%, at least 97%, at least 98%, or at least 99%, identical to a CD4 EC domain selected from the group consisting of SEQ ID NOs: 746-749 (e.g., SEQ ID NO: 746). In some embodiments, the first antigen binding domain comprises a first VH and a first VL comprising the amino acid sequences set forth, respectively, or comprising amino acid sequences that are at least 80%, at least 85%, at least 90%, at least 91%, at least 92%, at least 93%, at least 94%, at least 95%, at least 96%, at least 97%, at least 98%, or at least 99% identical to the amino acid sequences set forth, respectively: SEQ ID NOs: 49 and 55; SEQ ID NOs: 50 and 55; SEQ ID NOs: 50 and 56; SEQ ID NOs: 51 and 55; or SEQ ID NOs: 51 and 56; and the second antigen binding domain comprises one or more EC domains of CD4 comprising an amino acid sequence that comprises or is at least 80%, at least 85%, at least 90%, at least 91%, at least 92%, at least 93%, at least 94%, at least 95%, at least 96%, at least 97%, at least 98%, or at least 99%, identical to a CD4 EC domain selected from the group consisting of SEQ ID NOs: 746-749 (e.g., SEQ ID NO: 746). In some embodiments, the TLR agonist is a TLR2 agonist, a TLR3 agonist, a TLR7 agonist, a TLR8 agonist or a TLR9 agonist. In some embodiments, the TLR7 agonist is selected from the group consisting of vesatolimod, imiquimod, and resiquimod. In some embodiments, the methods entail multiple administrations of the one or more multi-specific antigen binding molecules, optionally with the TLR agonist, at predetermined intervals. In some embodiments, the subject does not exhibit symptoms of HIV or AIDS in the absence of anti-retroviral treatment (ART) for at least 6 months, at least 1 year, at least 2 years, at least 3 years, or more. In some embodiments, the subject has a viral load copies/ml blood of less than 500, e.g., less than 400, less than 300, less than 200, less than 100, less than 50, in the absence of anti-retroviral treatment (ART) for at least 6 months, at least 1 year, at least 2 years, at least 3 years, or more.

[0029] In a further aspect, provided is the use of the multi-specific (e.g., bispecific) antigen binding molecules or antigen binding fragment thereof, or the pharmaceutical compositions, as described herein, in a method of at least one of treating, preventing and inhibiting HIV in a human subject in need thereof. In a further aspect, provided are the multi-specific (e.g., bispecific) antigen binding molecules or antigen binding fragment thereof, or the pharmaceutical compositions, as described herein, for use in a method of at least one of treating, preventing and inhibiting HIV in a human subject in need thereof. In some embodiments, the use further comprises administering to the subject a second agent for treating an HIV infection. In some embodiments, the use further comprises administering to the subject at least one of a TLR agonist and an IL-15 receptor agonist. In some embodiments, the use entails administering a multi-specific antigen binding molecule having a first antigen binding domain that binds to CD3, and a second antigen binding domain that binds to an epitope or region of gp120 in the CD4 binding site (CD4bs) and comprises one or more extracellular (EC) domains of CD4, and optionally, an IL-15 receptor agonist. In some embodiments, the one or more EC domains of CD4 comprise a sequence as set forth in SEQ ID NOs: 746-749, or a sequence that is at least 80%, at least 85%, at least 90%, at least 91%, at least 92%, at least 93%, at least 94%, at least 95%, at least 96%, at least 97%, at least 98%, or at least 99% identical to an amino acid sequence of SEQ ID NOs: 746-749 (e.g., SEQ ID NO: 746). In some embodiments, the first antigen binding domain comprises a first VH-CDR1, a first VH-CDR2, a first VH-CDR3, a first VL-CDR1, a first VL-CDR2 and a first VL-CDR3 comprising the following amino acid sequences, respectively (according to Kabat): SEQ ID NOs: 1, 11, 8, 4, 9 and 10; or SEQ ID NOs: 1, 12, 8, 4, 9 and 10; and the second antigen binding domain comprises one or more EC domains of CD4 comprising an amino acid sequence that comprises or is at least 80%, at least 85%, at least 90%, at least 91%, at least 92%, at least 93%, at least 94%, at least 95%, at least 96%, at least 97%, at least 98%, or at least 99%, identical to a CD4 EC domain selected from the group consisting of SEQ ID NOs: 746-749 (e.g., SEQ ID NO: 746). In some embodiments, the first antigen binding domain comprises a first VH-CDR1, a first VH-CDR2, a first VH-CDR3, a first VL-CDR1, a first VL-CDR2 and a first VL-CDR3 comprising the following amino acid sequences, respectively (according to Chothia): SEQ ID NOs: 17, 18, 23, 20, 24 and 25; and the second antigen binding domain comprises one or more EC domains of CD4 comprising an amino acid sequence that comprises or is at least 80%, at least 85%, at least 90%, at least 91%, at least 92%, at least 93%, at least 94%, at least 95%, at least 96%, at least 97%, at least 98%, or at least 99%, identical to a CD4 EC domain selected from the group consisting of SEQ ID NOs: 746-749 (e.g., SEQ ID NO: 746). In some embodiments, the first antigen binding domain comprises a first VH-CDR1, a first VH-CDR2, a first VH-CDR3, a first VL-CDR1, a first VL-CDR2 and a first VL-CDR3 comprising the following amino acid sequences, respectively (according to IMGT): SEQ ID NOs: 28, 29, 32, 31, 24 and 10; and the second antigen binding domain comprises one or more EC domains of CD4 comprising an amino acid sequence that comprises or is at least 80%, at least 85%, at least 90%, at least 91%, at least 92%, at least 93%, at least 94%, at least 95%, at least 96%, at least 97%, at least 98%, or at least 99%, identical to a CD4 EC domain selected from the group consisting of SEQ ID NOs: 746-749 (e.g., SEQ ID NO: 746). In some embodiments, the first antigen binding domain comprises a first VH-CDR1, a first VH-CDR2, a first VH-CDR3, a first VL-CDR1, a first VL-CDR2 and a first VL-CDR3 comprising the following amino acid sequences, respectively (according to Honegger): SEQ ID NOs: 34, 42, 40, 37, 41 and 25; or SEQ ID NOs: 34, 43, 40, 37, 41 and 25; and the second antigen binding domain comprises one or more EC domains of CD4 comprising an amino acid sequence that comprises or is at least 80%, at least 85%, at least 90%, at least 91%, at least 92%, at least 93%, at least 94%, at least 95%, at least 96%, at least 97%, at least 98%, or at least 99%, identical to a CD4 EC domain selected from the group consisting of SEQ ID NOs: 746-749 (e.g., SEQ ID NO: 746). In some embodiments, the first antigen binding domain comprises a first VH and a first VL comprising the amino acid sequences set forth, respectively, or comprising amino acid sequences that are at least 80%, at least 85%, at least 90%, at least 91%, at least 92%, at least 93%, at least 94%, at least 95%, at least 96%, at least 97%, at least 98%, or at least 99% identical to the amino acid sequences set forth, respectively: SEQ ID NOs: 49 and 55; SEQ ID NOs: 50 and 55; SEQ ID NOs: 50 and 56; SEQ ID NOs: 51 and 55; or SEQ ID NOs: 51 and 56; and the second antigen binding domain comprises one or more EC domains of CD4 comprising an amino acid sequence that comprises or is at least 80%, at least 85%, at least 90%, at least 91%, at least 92%, at least 93%, at least 94%, at least 95%, at least 96%, at least 97%, at least 98%, or at least 99%, identical to a CD4 EC domain selected from the group consisting of SEQ ID NOs: 746-749 (e.g., SEQ ID NO: 746). In some embodiments, the TLR agonist is a TLR2 agonist, a TLR3 agonist, a TLR7 agonist, a TLR8 agonist or a TLR9 agonist. In some embodiments, the TLR7 agonist is selected from the group consisting of vesatolimod, imiquimod, and resiquimod. In some embodiments, the use comprises administering a first multi-specific antigen binding molecule and second or additional antigen binding molecules, wherein the first multi-specific antigen binding molecule and the second or additional antigen binding molecules bind to different first and second epitopes or regions of gp120 selected from the group consisting of: (i) third variable loop (V3) (e.g., high mannose patch) comprising a N332 oligomannose glycan; (ii) second variable loop (V2) (e.g., Env trimer apex); (iii) CD4 binding site (CD4bs); (iv) gp120/gp41 interface; or (v) silent face of gp120. In some embodiments, the first multi-specific antigen binding molecule binds to the third variable loop (V3) (e.g., high mannose patch) comprising a N332 oligomannose glycan, and the second antigen binding molecule binds to the CD4 binding site (CD4bs). In some embodiments, the first multi-specific antigen binding molecule competes with or comprises VH and VL regions from an antibody selected from the group consisting of 10-1074, 10-1074-J, GS-9722 (elipovimab), GS-2872, PGT-121, PGT-121.66, PGT-121.414, PGT-122, PGT-123, PGT-124, PGT-125, PGT-126, PGT-128, PGT-130, PGT-133, PGT-134, PGT-135, PGT-136, PGT-137, PGT-138, PGT-139, VRC24, 2G12, BG18, 354BG8, 354BG18, 354BG42, 354BG33, 354BG129, 354BG188, 354BG411, 354BG426, DH270.1, DH270.6, PGDM12, VRC41.01, PGDM21, PCDN-33A, BF520.1 and VRC29.03, and the second antigen binding molecule competes with or comprises VH and VL regions from an antibody selected from the group consisting of b12, F105, VRC01, VRC07, VRC07-523, VRC03, VRC06, VRC06b01 VRC08, VRC0801, NIH45-46, 3BNC117, 3BNC60, PGV04 (a.k.a., VRC-PG04); CH103, 44-VRC13.01, 1NC9, 12A12, N6, 1-18, N49-P7, NC-Cow1, IOMA, CH235 and CH235.12, N49P6, N49P7, N49P11, N49P9 and N60P25. In some embodiments, the first multi-specific antigen binding molecule competes with or comprises VH and VL regions from an antibody selected from the group consisting of 10-1074, 10-1074-J, GS-9722 (elipovimab), GS-2872, PGT-121, PGT-121.66, PGT-121.414 and PGT-134, and the second antigen binding molecule competes with or comprises VH and VL regions from 3BNC117, GS-9723, VRC07 or VRC07-523. In some embodiments, the first multi-specific antigen binding molecule competes with or comprises VH and VL regions from an antibody selected from the group consisting of 10-1074, 10-1074-J, GS-9722 (elipovimab), GS-2872, PGT-121, PGT-121.66, PGT-121.414 and PGT-134, and the second antigen binding molecule comprises an EC domain of CD4. In some embodiments, the first multi-specific antigen binding molecule binds to the CD4 binding site (CD4bs) and the second or additional antigen binding molecules bind to the third variable loop (V3) (e.g., high mannose patch) comprising a N332 oligomannose glycan. In some embodiments, the first multi-specific antigen binding molecule competes with or comprises VH and VL regions from an antibody selected from the group consisting of GS-9723, GS-5423, 3BNC117, 3BNC60, b12, F105, VRC01, VRC07, VRC07-523, VRC03, VRC06, VRC06b01 VRC08, VRC0801, NIH45-46, PGV04 (a.k.a., VRC-PG04); CH103, 44-VRC13.01, 1NC9, 12A12, N6, 1-18, N49-P7, NC-Cow1, IOMA, CH235 and CH235.12, N49P6, N49P7, N49P11, N49P9 and N60P25, and the second or additional antigen binding molecules compete with or comprise VH and VL regions from an antibody selected from the group consisting of GS-9722 (elipovimab), GS-2872, PGT-121, PGT-121.66, PGT-121.414, PGT-122, PGT-123, PGT-124, PGT-125, PGT-126, PGT-128, PGT-130, PGT-133, PGT-134, PGT-135, PGT-136, PGT-137, PGT-138, PGT-139, 10-1074, 10-1074-J, VRC24, 2G12, BG18, 354BG8, 354BG18, 354BG42, 354BG33, 354BG129, 354BG188, 354BG411, 354BG426, DH270.1, DH270.6, PGDM12, VRC41.01, PGDM21, PCDN-33A, BF520.1 and VRC29.03. In some embodiments, the first multi-specific antigen binding molecule competes with or comprises VH and VL regions from an antibody selected from the group consisting of GS-9723, GS-5423, 3BNC117, VRC07 and VRC07-523, and the second or additional antigen binding molecules compete with or comprise VH and VL regions from 10-1074, 10-1074-J, GS-9722 (elipovimab), GS-2872, PGT-121, PGT-121.66, PGT-121.414 and PGT-134. In some embodiments, the first multi-specific antigen binding molecule competes with or comprises an EC domain of CD4, and the second or additional antigen binding molecules compete with or comprise VH and VL regions from an antibody selected from the group consisting of GS-9722 (elipovimab), GS-2872, PGT-121, PGT-121.66, PGT-121.414, PGT-122, PGT-123, PGT-124, PGT-125, PGT-126, PGT-128, PGT-130, PGT-133, PGT-134, PGT-135, PGT-136, PGT-137, PGT-138, PGT-139, 10-1074, 10-1074-J, VRC24, 2G12, BG18, 354BG8, 354BG18, 354BG42, 354BG33, 354BG129, 354BG188, 354BG411, 354BG426, DH270.1, DH270.6, PGDM12, VRC41.01, PGDM21, PCDN-33A, BF520.1 and VRC29.03. In some embodiments, the first multi-specific antigen binding molecule competes with or comprises an EC domain of CD4, and the second or additional antigen binding molecules compete with or comprise VH and VL regions from an antibody selected from the group consisting of 10-1074, 10-1074-J, GS-9722 (elipovimab), GS-2872, PGT-121, PGT-121.66, PGT-121.414 and PGT-134. In some embodiments, the use further comprises administering second or additional antigen binding molecules compete with or comprise VH and VL regions from an antibody selected from the group consisting of GS-9723, GS-5423, 3BNC117, 3BNC60, b12, F105, VRC01, VRC07, VRC07-523, VRC03, VRC06, VRC06b01 VRC08, VRC0801, NIH45-46, PGV04 (a.k.a., VRC-PG04); CH103, 44-VRC13.01, 1NC9, 12A12, N6, 1-18, N49-P7, NC-Cow1, IOMA, CH235 and CH235.12, N49P6, N49P7, N49P11, N49P9 and N60P25. In some embodiments, the use further comprises administering second or additional antigen binding molecules compete with or comprise VH and VL regions from an antibody selected from the group consisting of GS-9723, GS-5423, 3BNC117, VRC07 and VRC07-523. In some embodiments, the use comprises co-administering: (i) a multi-specific antigen binding molecule comprising an EC domain of CD4, as described herein; (ii) an antibody that competes with or comprises VH and VL regions from an antibody selected from the group consisting of 10-1074, 10 1074-J, GS-9722 (elipovimab), GS-2872, PGT-121, PGT-121.66, PGT-121.414 and PGT-134; and (iii) an antibody that competes with or comprises VH and VL regions from an antibody selected from the group consisting of GS-9723, GS 5423, 3BNC117, VRC07 and VRC07-523. In some embodiments, the use further comprises administering to the human subject an additional antigen binding molecule or antigen binding fragment thereof that at least one of binds, inhibits, and neutralizes HIV or a polynucleotide encoding the additional antigen binding molecule or antigen binding fragment thereof. In some embodiments, the human subject is infected with an HIV expressing a gp120 comprising the following amino acid residues: N332/D325; N332/D325/H330; N332/D325/H330/T320; N332/D325/H330/T63; N332/D325/H330/T63/T320; or N332/D325/H330/T63/T320/L179.

[0030] Unless otherwise defined, all technical and scientific terms used herein have the same meaning as commonly understood by one of ordinary skill in the art to which this invention belongs. Although methods and materials similar or equivalent to those described herein can be used in the practice or testing of the present bispecific molecules described herein, the exemplary methods and materials are described below. All publications, patent applications, patents, and other references mentioned herein are incorporated by reference in their entirety. In case of conflict, the present application, including definitions, will control. The materials, methods, and examples are illustrative only and not intended to be limiting.

[0031] Other features and advantages of the invention will be apparent from the following detailed description and from the claims.

### BRIEF DESCRIPTION OF THE DRAWINGS

[0032] FIG. 1 illustrates a homology model of mSP34. The sidechains of potential solvent exposed sequence liabilities are shown as spheres and labelled using single letter amino acid nomenclature and numbered according to Kabat.

[0033] FIGS. 2A-2B. FIG. 2A illustrates a sequence alignment of the mSP34 heavy chain variable domain and five comparators found in clinical stage antibodies. Potential solvent exposed sequence liabilities (FIG. 1) are underlined. FIG. 2A depicts SEQ ID NOs: 1044-1049, respectively, in order of appearance. FIG. 2B illustrates a sequence alignment of the mSP34 light chain variable domain and five comparators found in clinical stage antibodies.

[0034] FIG. 2B depicts SEQ ID NOs: 1050-1055, respectively, in order of appearance.

[0035] FIG. 3 illustrates a structural superposition of homology models of mSP34 (white) and the closest human germline (black) found using the IMGT domain gap align server. The models were created using Discovery Studio 2017r2 (Biovia) and superposed using PyMOL (Schrödinger, Inc.). The Ca backbone trace is shown.

[0036] FIGS. 4A-4B. FIG. 4A illustrates a heavy chain (HC) sequence alignment of mSP34, the closest human germline and the first round of huSP34 heavy chain variants (SEQ ID NOs: 1064-1075, respectively, in order of appearance). FIG. 4B illustrates a light chain (LC) sequence alignment of mSP34, the closest human germline and the first round of huSP34 light chain variants (SEQ ID NOs: 1056-1063, respectively, in order of appearance).

[0037] FIGS. 5A-5B. FIG. 5A illustrates a heavy chain (HC) sequence alignment of mSP34, the closest human germline and the second round of huSP34 heavy chain variants ((SEQ ID NOs: 1082-1087, respectively, in order of appearance). FIG. 5B illustrates a light chain (LC) sequence alignment of mSP34, the closest human germline and the second round of huSP34 light chain variants (SEQ ID NOs: 1076-1081, respectively, in order of appearance).

[0038] FIGS. 6A-6D illustrate an analysis of anti-CD3 affinity (Octet BLI) (FIG. 6A), charge homogeneity (CX-1) (FIG. 6B), aggregation propensity (size exclusion column (SEC)) (FIG. 6C) and match to the human germline (FIG. 6D) for the first and second round huSP34 Fab variants, mSP34 human chimeric Fab and comparator huSP34 Fab molecules.

[0039] FIGS. 7A-7D. FIG. 7A illustrates examples of scFv-Fc/Fab-Fc bispecific antibodies designed as part of the present bispecific molecules. FIG. 7B illustrates examples of CD4 ECD-Fc/Fab-Fc bispecific fusion proteins designed as part of the present bispecific molecules. FIG. 7C illustrates examples of CD4 ECD-Fc/scFv-Fc bispecific fusion proteins designed as part of the present bispecific molecules. FIG. 7D illustrates examples of CD4 ECD-Fc/scFv-Fc or CD4 ECD-Fc/Fab-Fc bispecific fusion proteins incorporating bivalent or tandem CD4 ECDs and designed as part of the present bispecific molecules. All technologies illustrated are optional and may be omitted or used in combinations beyond what is shown in these figures. Key: ΔEF=remove effector function (e.g., FcγR binding reduced or eliminated with at least one of L234A and L235A (LALA) mutations; C1q binding reduced or eliminated with P331S mutation; collectively “AAS”); knob and hole=engineered Fc heterodimer (e.g., “hole” (H) mutations include T366S, L368A and Y407V (“SAV”); “knob” (K) mutations include T366W (“W”); HLE=half-life extension (e.g., M252Y, S254T and T256E (“YTE”) or M428L and N434S (“LS”)); AProA=reduce or eliminate Protein A binding (e.g., H435R or H435R+Y436F (“RF”)); linker=scFv linker (e.g., (GGGS)₄ (SEQ ID NO: 711) or (GGGGS)₄ (SEQ ID NO: 750)).

[0040] FIGS. 8A and 8B. FIG. 8A illustrates representative HiTrap® SP HP (Cytiva Life Sciences) cation exchange chromatography (employed to isolate the bispecific antibody or fusion protein Fc heterodimer from Fc homodimer or other contaminants with low isoelectric points (pI) using a gradient of 0-30% 1M NaCl in 20 mM sodium phosphate pH 7.0) to separate the desired bispecific antibody or fusion protein Fc heterodimer from Fc homodimer or other contaminants with low isoelectric points (pI)) and SDS-PAGE analysis for purification of the hPGT121.66 (see, e.g., WO 2018/237148) AAS+W/huSP34.13.10scFv AAS+SAV+RF Fab-scFv-Fc bispecific antibody (Ab 265; SEQ ID NOs: 848, 829 and 823) (bispecific molecules described herein are summarized in Table 53). FIG. 8B illustrates representative HiTrap® SP HP (Cytiva Life Sciences) cation exchange chromatography results and SDS-PAGE analysis for purification of the hCD4 D1.22 Fc AAS+SAV+YTE/huSP34.3.13 AAS+W+YTE Fab-Fc-fusion bispecific molecule 185.

[0041] FIG. 9 illustrates the analytical CX-1% main peak values for all round 1 huSP34 Fab variants. The variants containing asparagine (N) at heavy chain (HC) position 100 were compared with those containing histidine at heavy chain position 100 using an unpaired t test. The results suggest that H100 contributed significantly to improved charge homogeneity.

[0042] FIG. 10 illustrates representative binding of a bispecific to immobilized CD3 obtained from SPR experiments. Black lines denote injection of the bispecific 249 at various concentrations for a period of 120 seconds. Dissociation was then monitored for 80 seconds except for the highest concentration where dissociation was monitored for 10.5 minutes. Smoothed gray lines represent the fit to this data as obtained from a simple kinetic model. This model was used to derive kₒₙ, k_{off}, and K_{D} for these interactions.

[0043] FIG. 11 illustrates a representative binding concentration-response curve of PGT121.66×huSP34 bispecific antibodies 265 (circle), 251 (square), 259 (upright triangle; dotted line). 258 (inverted triangle; solid line) and 260 (diamond) to CD4+ T cells (from Donor 4574). Bispecific molecules described herein are summarized in Table 53.

[0044] FIG. 12 illustrates a representative binding concentration-response curve of PGT121.66×huSP34 bispecific antibodies 265 (circle), 251 (square), 259 (upright triangle; dotted line). 258 (inverted triangle; solid line) and 260 (diamond) to CD8+ T cells (from Donor 4574).

[0045] FIGS. 13A-13B illustrate a representative binding concentration-response curve of (A) PGT121.66×huSP34 bispecific antibodies 257 (solid circle), 274 (solid square), 273 (solid, upright triangle), 275 (solid inverted triangle), 256 (solid diamond), 243 (half-solid circle), 251 (half-solid square) and 261 (half-solid upright triangle) to human CD4+ T cells in PBMCs (from Donor hu 151) and (B) CD4×huSP34 bispecific 180 to human CD4+ T cells in PBMCs (from Donor hu 921).

[0046] FIGS. 14A-14B illustrate a representative binding concentration-response curve of (A) PGT121.66×huSP34 bispecific antibodies 257 (solid circle), 274 (solid square), 273 (solid, upright triangle), 275 (solid inverted triangle), 256 (solid diamond), 243 (half-solid circle), 251 (half-solid square) and 261 (half-solid upright triangle) to monkey CD4+ T cells in PBMCs (from rhesus Donor rh 3563) and (B) CD4×huSP34 bispecific 180 to monkey CD4+ T cells in PBMCs (from cynomolgus Donor cy 2177).

[0047] FIGS. 15A-15B illustrate a representative binding concentration-response curve of (A) PGT121.66×huSP34 bispecific antibodies 257 (solid circle), 274 (solid square), 273 (solid, upright triangle), 275 (solid inverted triangle), 256 (solid diamond), 243 (half-solid circle), 251 (half-solid square) and 261 (half-solid upright triangle) to human CD8+ T cells in PBMCs (from Donor hu 151) and (B) CD4×huSP34 bispecific 180 to human CD8+ T cells in PBMCs (from Donor hu 921).

[0048] FIGS. 16A-16B illustrates a representative binding concentration-response curve of (A) PGT121.66×huSP34 bispecific antibodies 257 (solid circle), 274 (solid square), 273 (solid, upright triangle), 275 (solid inverted triangle), 256 (solid diamond), 243 (half-solid circle), 251 (half-solid square) and 261 (half-solid upright triangle) to rhesus CD8+ PBMCs (from Donor rh 3563) and (B) CD4×huSP34 bispecific 180 to monkey CD8+ T cells in PBMCs (from cynomolgus Donor cy 2177).

[0049] FIG. 17 illustrates EC₅₀ values derived from concentration-response curves of PGT121.66×huSP34 bispecific antibodies 257 (solid circle), 274 (solid square), 273 (solid, upright triangle), 275 (solid inverted triangle), 256 (solid diamond), 243 (open circle), 251 (open square) and 261 (open upright triangle) binding to human (hu) and rhesus (rh) CD4+ PBMCs.

[0050] FIG. 18 illustrates EC₅₀ values derived from concentration-response curves of PGT121.66×huSP34 bispecific antibodies 257 (solid circle), 274 (solid square), 273 (solid, upright triangle), 275 (solid inverted triangle), 256 (solid diamond), 243 (open circle), 251 (open square) and 261 (open upright triangle) binding to human (hu) and rhesus (rh) CD8+ PBMCs.

[0051] FIG. 19 illustrates a representative killing concentration-response curve by PGT121.66×huSP34 bispecific antibodies 265 (solid circle), 259 (upright triangle), 258 (inverted triangle), 251 (square), and 260 (half-solid circle) using PBMC effector cells.

[0052] FIG. 20 illustrates a Pearson correlation of PGT121.66×huSP34 bispecific antibodies (from highest to lowest PBMC killing EC₅₀ value) 258, 260, 259, 251 and 265. huSP34 variant CD3 binding affinity vs. PBMC killing EC₅₀ values. The killing EC₅₀ value is the geometric mean EC₅₀ value of the 5 viruses tested with two donors.

[0053] FIG. 21 illustrates a Pearson correlation of PGT121.66×huSP34 bispecific antibodies (from highest to lowest T cell killing EC₅₀ value) 260, 258, 259, 251 and 265. huSP34 variant CD3 binding affinity vs. isolated T cell killing EC₅₀ values. The killing EC₅₀ value is the geometric mean EC₅₀ value of the 5 viruses tested with two donors.

[0054] FIG. 22 illustrates a representative concentration-response curve of killing by 3BNC117.52.64×huSP34 bispecific antibodies 237 (circle), 230 (square) and 232 (triangle) using PBMC effector cells.

[0055] FIG. 23 illustrates a Pearson correlation of 3BNC117.52.64×CD3 bispecific antibodies (from highest to lowest PBMC cell killing EC₅₀ value) 238, 230 and 237. huSP34 variant CD3 binding affinity vs. PBMC killing EC₅₀ values. The killing EC₅₀ value is the geometric mean EC₅₀ value of the 5 viruses tested with two donors.

[0056] FIG. 24 illustrates a representative killing concentration-response curve of primary HIV-infected (virus 657) CD4+ cells by PGT121.66×huSP34 bispecific molecules 265 (circle) 251 (square) and 259 (triangle) using PBMC effector cells (E:T=3:1).

[0057] FIG. 25 illustrates a representative killing concentration-response curve of primary HIV-infected (virus 7552) CD4+ cells by PGT121.66×huSP34 bispecific molecules 265 (circle) 251 (square) and 259 (triangle) using PBMC effector cells (E:T=3:1).

[0058] FIG. 26 illustrates EC₅₀ values of killing curves plotted across CD4 ECD×α-CD3 bispecific molecules (from right-to-left: 212, 211, 213, 198, 187, 199 and 186). The geomean EC₅₀ value for each molecule (−) calculated from all viruses/donors are shown.

[0059] FIG. 27 illustrates antibody- and bispecific-mediated killing of primary CD4+ T cells infected with different HIV isolates. Primary CD4+ T cells were infected with a panel of 32 HIV isolates and incubated with the antibodies or antibody combinations indicated and autologous PBMCs as effector cells. Data on the graph represents the EC₅₀ values determined in the killing assay for each HIV isolate and antibody, bispecific or antibody/bispecific combination (from left to right: PGT121.42, h3BNC117.52.64, bispecific 180, PGT121.42+h3BNC117.52.64 combination, PGT121.42+h3BNC117.52.64+bispecific 180 combination. Horizontal bars indicate the median and 95% confidence intervals.

[0060] FIG. 28 EC₅₀ values of binding curves for 24 virus isolate-infected cells plotted across test bispecific molecules 186, 255 and 230.

[0061] FIG. 29 illustrates pharmacokinetic (PK) profiles for PGT121.66×huSP34 bispecific molecules 250 (circle), 252 (square), and 251 (triangle) dosed at 1 mg/kg IV to naïve male cynomolgus monkeys (n=3). For comparison, dose normalized individual monkey PK profiles for Comparator #7 bispecific (dashed lines) dosed at 30 mg/kg IV on Day 0 and 7. Each symbol is the measured mean±standard deviation (SD) serum concentration.

[0062] FIG. 30 illustrates PK profiles for PGT121.66×huSP34 bispecific molecules 264 (solid circle), 265 (solid square), 261 (solid triangle), 262 (open circle), and 263 (open square) following 1 mg/kg IV dosing to naïve male cynomolgus monkeys (n=3). Each symbol is the measured mean±SD serum concentration.

[0063] FIG. 31 illustrates PK profiles for PGT121.66×huSP34 bispecific molecules 257 (solid circle), 274 (open circle), 273 (solid square), 275 (open square), 256 (solid triangle), and 243 (open triangle) following 1 mg/kg IV dosing to naïve male cynomolgus monkeys (n=2). Each symbol is the measured mean serum concentration.

[0064] FIG. 32 illustrates PK profiles for PGT121.66×huSP34 bispecific molecules 249 (solid circle), 276 (solid square), 277 (solid triangle), and 218 (open circle) following 1 mg/kg IV dosing to naïve male cynomolgus monkeys (n=2 or 3). Each symbol is the measured mean±SD serum concentration.

[0065] FIG. 33 illustrates PK profiles for CD4 ECD×huSP34 bispecific molecules 186 (solid circle), 187 (solid square), 180 (open circle), 182 (open square), and 185 (open triangle) following 1 mg/kg IV dosing to naïve male cynomolgus monkeys (n=3). Bispecific molecules 186 and 187 were dosed on Day 0 and 14. Each symbol is the measured mean±SD serum concentration.

[0066] FIG. 34 illustrates organization of an expression vector having polynucleotide sequences encoding the expression of the three polypeptide chains of an asymmetric bispecific molecule having an anti-HIV gp120 Fab and an anti-CD3 scFv. The vector was designed to drive the expression of three polypeptide chains: heavy chain and light chain of anti-gp120 Fab and scFv of anti-CD3 from three separate expression cassettes, each driven by its own promoter of equal transcription strength (e.g., a cytomegalovirus (CMV) promotor). An additional DNA cassette having a polynucleotide encoding a eukaryotic selection marker (e.g., glutamine synthetase (GS)) using a promoter of relatively weaker transcription strength (e.g., an SV40 promoter) was included in the expression vector. DNA encoding for a bacterial origin of replication (e.g., Ori) and an antibiotic selection marker (e.g., ampicillin (AmpR)) were utilized for expression vector production in E. coli.

[0067] FIG. 35 illustrates an evaluation of expression performance of cell lines expressing asymmetric bispecific molecules having an anti-HIV gp120 Fab and an anti-CD3 scFv. The expression performance was assessed by culturing the cells expressing the bispecific molecules in a fed-batch process and evaluating their performance at baseline (D0) and upon aging (D30). Expression of multiple species including the bispecific molecule of interest was measured using a ProA based Bio-layer interferometry and the relative levels of the heterotrimer (Het %, heterotrimer %) comprising the asymmetric bispecific molecule was monitored using size separation methods (non-reduced capillary electrophoresis).

[0068] FIG. 36 illustrates organization of an expression vector having polynucleotide sequences encoding the expression of the three polypeptide chains of an asymmetric bispecific molecule having an anti-CD3 Fab and a CD4 extracellular (EC) domain-Fc fusion protein. The vector was designed to drive the expression of three polypeptide chains: heavy chain and light chain of anti-CD3 Fab and CD4-Fc fusion protein from three separate expression cassettes, each driven by its own promoter of equal transcription strength (e.g., a cytomegalovirus (CMV) promotor). An additional DNA cassette having a polynucleotide encoding a eukaryotic selection marker (e.g., glutamine synthetase (GS)) using a promoter of relatively weaker transcription strength (e.g., an SV40 promoter) was included in the expression vector. DNA encoding for a bacterial origin of replication (e.g., Ori) and an antibiotic selection marker (e.g., ampicillin (AmpR)) were utilized for expression vector production in E. coli.

[0069] FIG. 37 illustrates an evaluation of expression performance of cell lines expressing asymmetric bispecific molecules having an anti-CD3 Fab and a CD4-Fc fusion protein. The expression performance was assessed by culturing the cells under the production mode (fed-batch process). Each dot represents the selected clones, where the ratio of the desired species (Het %, heterotrimer %) was monitored by size separation method (non-reduced capillary electrophoresis). The amounts of desired heterotrimer comprising the asymmetric bispecific molecule were calculated as the amount of total bispecific molecule (detected via ProA Biosensors) and then multiplied by the heterotrimer % (specific titer in g/L).

[0070] FIG. 38 illustrates PGT121/anti-CD3 bispecific antibody pharmacokinetics in serum before ART discontinuation. Peak serum antibody levels are shown following each of the twelve infusions (2 infusions first with anti-CD3KO version followed by 10 of anti-CD3 version) of antibody and during the washout period. Dotted lines indicate limit of detection. Dotted line indicates limit of detection.

[0071] FIG. 39 illustrates SHIV viral loads following ART discontinuation. Plasma viral load for 168 days following ART discontinuation. Numbers and percentages of animals that did not show viral rebound are shown. Limit of detection is 1.7 log RNA copies per ml.

[0072] FIG. 40 illustrates plasma viral loads before and after CD8+ cell depletion in animals with no viral rebound (n=1) and animals with viral rebound (n=4) following ART discontinuation. Numbers of animals that remained aviremic and total number of animals are shown. Arrows indicate CD8+ cell depletion on day 245 (week 77) after ART discontinuation. Limit of detection is 1.7 log RNA copies per ml.

### DETAILED DESCRIPTION

### 1. Introduction

[0073] Provided are multi-specific or bispecific antigen binding molecules, targeting CD3 and an HIV antigen (e.g., gp120 or gp41), designed for improved manufacturing efficiency, reduced cost, improved drug-like properties (e.g., increased sequence identity to human germline and reduced off-target binding and inducement of anti-drug antibodies (ADAs)). The Fc-containing multi-specific or bispecific molecules described herein can be efficiently produced at high yield using a single cell line with a simplified purification process. We have developed multi-specific or bispecific molecules having an anti-CD3 antibody variable domain with (1) a high affinity for human and non-human primate (NHP) (e.g., to facilitate pre-clinical toxicity studies) CD3, (2) a high sequence similarity to the human germline (e.g., to reduce or eliminate risk of immunogenicity and anti-drug antibody (ADA) reactions in human patients), (3) IgG-like pharmacokinetic (PK) properties with no evidence of ADA in non-human primates (e.g., to facilitate pre-clinical efficacy and toxicity studies) (4) reduced product heterogeneity via removal of sequence liabilities (e.g., deamidation, aspartate isomerization) to improve manufacturing, (5) high thermodynamic stability (e.g., to ensure product stability), (6) low aggregate content (e.g., to reduce risk of immunogenicity), (7) low polyspecificity (to reduce the risk of immunogenicity and improve PK properties), and (8) a heavy chain variable region (VH) with low or no binding to Protein A affinity chromatography resin (e.g., to facilitate efficient purification of bispecific antibody heterodimers). Further the anti-CD3 antibody variable domain possesses all the foregoing desirable properties in both scFv and Fab formats, such that it can be incorporated into a variety of bispecific antibody formats containing three or fewer polypeptide chains, e.g., to limit light chain miss-pairing or other sources of bispecific antibody product heterogeneity.

[0074] In some embodiments, the multi-specific or bispecific molecules comprise a first antigen binding domain, targeting human CD3, that is a single chain variable fragment (scFv) fused to Fc, while the second antigen binding domain, targeting an HIV antigen (e.g., gp120 or gp41) is comprised of a Fab antigen binding fragment fused to Fc. The resulting molecules have three polypeptide chains (i.e., scFv heavy chain, Fab heavy chain, Fab light chain), which are co-expressed in a single cell line. Formation of the desired bispecific heterodimeric molecule is facilitated through use of mutations in the Fc region that limits unwanted homodimerization of either half molecule, while the use of a scFv fragment as one of the antigen binding arms eliminates the need to co-express two different light chains that can otherwise lead to heterogeneity resulting from incorrect light chain pairing. Purification of the multi-specific antigen binding molecules is simplified and improved by eliminating the ability of the variable regions and one the of Fc regions to bind Protein A. Employing this design strategy, one of the two possible homodimer impurities is not retained during Protein A-based capture of the bispecific from cell culture media.

[0075] In various embodiments of the present multi-specific antigen binding molecules the first and second Fc regions of native human IgG sequences can be modified to promote heavy chain heterodimerization, allow for simplified and efficient purification, and to reduce or remove binding to FcγR and C1q.

[0076] Heterodimerization of the first and second Fc regions can be facilitated by introduction of ‘knobs-into-holes’ mutations (Atwell et al. 1997. JMB 270:26-35). The ‘hole’ mutations (T366S, L368A and Y407V) are incorporated into one Fc-containing chain, the T366W ‘knob’ mutation is used in the other chain (Atwell et al., supra). In addition, the C220S mutation can be incorporated into the IgG1 hinge region of the scFv-containing arm to eliminate the free cysteine, which would otherwise form a disulfide bond with a corresponding cysteine in an immunoglobulin light chain. Co-transfection of such constructs into a single host cell promotes formation of a heterodimeric Fc, with low levels of homodimer contaminants. The S354C (made in the Fc containing the ‘knob’ mutations) and Y349C (made in the Fc containing the ‘hole’ mutations) mutations can optionally be incorporated to generate a covalent bond between the two halves of the heterodimeric Fc if additional thermodynamic stability is desired (Merchant et al. 1998. Nat. Biotechnol. 16: 677-81). As described herein, numbering of amino acid positions for substitutions in the first and second Fc regions is according to Eu index.

[0077] Purification of the heterodimeric molecule away from contaminating homodimeric products can be facilitated by introducing into the first or the second Fc region H435R or H435R+Y436F mutations to reduce or eliminate Protein A binding (Jendeberg, L. et al. 1997 J. Immunol. Methods 201:25-34), optionally combined with mutations in any variable heavy (VH) region of the same chain should such VH be derived from a human VH3 germline. For example, additional VH mutations can be made at one or more of positions R19, T57, G65, Q81 and N82a, as numbered according to the Kabat numbering system. Incorporation of such amino acid substitutions in the Fc region, and optionally in the VH region, can reduce or eliminate Protein A binding of the homodimer contaminants, and greatly simplifies purification of the desired heterodimer away from remaining homodimer contaminant via additional chromatography steps (e.g., ion exchange).

[0078] In certain embodiments, the first and second Fc domain or Fc region incorporate amino acid substitutions to reduce or eliminate one or more of effector function (antibody-dependent cellular cytotoxicity (ADCC), antibody-dependent cellular phagocytosis (ADCP), and complement-dependent cytotoxicity (CDC)). In these contexts, at least one of the first and second Fc region can incorporate one or both of the L234A and L235A mutations to reduce or eliminate FcγR binding (Chappel, M. S et al. 1991 PNAS 88:9036-9040), and/or the P331S mutation to reduce or eliminate C1q binding (Xu Y, et al. J Biol Chem. 1994. 269:3469-74).

[0079] scFv fragments represent a minimal antibody-derived antigen binding unit, and are generated by direct fusion of a variable heavy and variable light domain via a flexible polypeptide linker (Huston et al., 1988, PNAS 85:5879-5883). The sequence of this linker can contain 3 or 4 repeats of a GGGGS motif (SEQ ID NO: 712) (Desplancq et al. 1994, Protein Engineering 7:1027-1033). In various embodiments, the G44C mutation (variable heavy domain) and the G100C mutation (variable light domain) can be incorporated to generate a covalent disulfide bond between the VH and VL domains of the scFv if additional thermodynamic stability is desired (Brinkmann, U et al., 1993, PNAS 90: 7538-7542).

[0080] In embodiments comprising a first antigen binding domain in the form of a scFv, and a second antigen binding domain in the form of a Fab, the three polypeptide chains can co-expressed in a single host cell and purified via Protein A chromatography. The desired Fab-scFv-Fc heterodimer is the dominant species observed in non-reducing SDS-PAGE analysis. Contaminating homodimeric species can be further mitigated using the H435R or H435R+Y436F mutations in the first or second Fc regions. Subsequent polishing using ion exchange chromatography and dialysis into a standard formulation buffer generates final material with high purity and homogeneity, e.g., that is at least 90%, e.g., at least 91%, 92%, 93%, 94%, 95%, 96%, 97%, 98%, 99%, or more, pure.

### 2. Anti-CD3 Effector Arm

[0081] Cluster of Differentiation (CD3) is a multimeric protein complex that is composed of four distinct polypeptide chains: epsilon (ε) (CD3E; NCBI Gene ID: 916), gamma (γ) (CD3G; NCBI Gene ID: 917), delta (δ) (CD3D; NCBI Gene ID: 915) and zeta (ζ) (CD247; NCBI Gene ID: 919), that assemble and function as three pairs of dimers (εγ, εδ, ζζ). CD3 proteins have an N-terminal extracellular region, a transmembrane domain, and a cytoplasmic tail where the immunoreceptor tyrosine activation motifs (ITAMs) are located. The extracellular domains of CD3ε, γ and δ contain an immunoglobulin-like domain and thus are considered part of the immunoglobulin superfamily. The CD3/T-cell co-receptor helps to activate both CD8⁺ T-cells and also CD4⁺ T-cells.

[0082] The amino acid sequence of human CD3ε can be found at UNiProtKB-P07766 and is provided below (the signal sequence is underlined):

(SEQ ID NO: 130)
MQSGTHWRVL GLCLLSVGVW GQDGNEEMGG ITQTPYKVSI
SGTTVILTCP QYPGSEILWQ HNDKNIGGDE DDKNIGSDED
HLSLKEFSEL EQSGYYVCYP RGSKPEDANF YLYLRARVCE
NCMEMDVMSV ATIVIVDICI TGGLLLLVYY WSKNRKAKAK
PVTRGAGAGG RQRGQNKERP PPVPNPDYEP IRKGQRDLYS
GLNQRRI

[0083] The amino acid sequence of human CD3δ can be found at UNiProtKB-P04234 and is provided below (the signal sequence is underlined):

(SEQ ID NO: 319)
MEHSTFLSGL VLATLLSQVS PFKIPIEELE DRVFVNCNTS
ITWVEGTVGT LLSDITRLDL GKRILDPRGI YRCNGTDIYK
DKESTVQVHY RMCQSCVELD PATVAGIIVT DVIATLLLAL
GVFCFAGHET GRLSGAADTQ ALLRNDQVYQ PLRDRDDAQY
SHLGGNWARN K

[0084] Antibodies that bind human CD3 have been described, e.g., in Kuhn & Weiner, Immunotherapy, 8(8):889-906 (2016); WO 2015/001085; WO 2015/104346. OKT3 (Muromonab-CD3), an anti-CD3 antibody directed against CD3ε, has been clinically approved for use in humans for the induction of immunosuppression in solid organ transplantation for the prevention and treatment of rejection (Norman, Therapeutic Drug Monitoring, 17, 615-620 (1995)). Teplizumab, also known under the names hOKT3γ1 (Ala-Ala) and MGA031, is a humanized IgG1 antibody that was developed by grafting the complementarity determining region of OKT3 into a human IgG1 backbone. Introduction of two point mutations in its Fc portion decreases binding to FcR. Otelixizumab (ChAglyCD3, TRX4, GSK2136525) was derived from the rat antibody YTH12.5. This humanized IgG1 bears a single mutation in the 71 Fc portion to avoid glycosylation and thus inhibit FcR binding. Visilizumab (Nuvion, HuM291) is a humanized IgG2 antibody that is rendered non-mitogenic by two point mutations in its Fc region. Foralumab (28F11-AE; NI-0401) is an entirely human anti-CD3 mAb; the Fc portion of this human IgG1 was mutated such that the mAb is non FcR binding in vitro and exhibits only minor cytokine release in vivo while maintaining modulation of the CD3/TCR and T-cell depletion. Non-limiting examples of anti-CD3 antibodies are also disclosed in US 2016/0333095A1.

[0085] In certain embodiments, the anti-CD3 antigen binding domains described herein bind human CD3. In some instances, the anti-CD3 antigen binding domains described herein bind human CD3c. In some embodiments, the anti-CD3 antigen binding domains described herein bind human CD36.

### Exemplary Anti-CD3 Antigen Binding Domain Sequences

[0086] In various embodiments, the first antigen binding domain, targeting or binding to, or specifically binding to human CD3, comprises a first heavy chain variable domain (VH) and a first light chain variable domain (VL), comprising: (i) a first VH-complementarity determining region (CDR) 1 comprising the amino acid sequence of TYAMN (SEQ ID NO:1); (ii) a first VH-CDR2 comprising the amino acid sequence of RIRSKYNNYATYYAX₁SVKX₂, wherein X₁ is A or D and X₂ is G or S (SEQ ID NO:2); (iii) a first VH-CDR3 comprising the amino acid sequence of HGNFGX₃SYVSWFAY, wherein X₃ is H or N (SEQ ID NO:3); (iv) a first VL-CDR1 comprising the amino acid sequence of GSSTGAVTTGHYAN (SEQ ID NO: 4); (v) a first VL-CDR2 comprising the amino acid sequence of GTX₄X₅RAP, wherein X₄X₅ is SN or NK (SEQ ID NO:5); and (vi) a first VL-CDR3 comprising the amino acid sequence of ALWYSNX₆WV, wherein X₆ is L or R (SEQ ID NO:6), wherein the first VH-CDR1, the first VH-CDR2, the first VH-CDR3, the first VL-CDR1, the first VL-CDR2, and the first VH-CDR3 are according to Kabat. In some embodiments, (i) the first VH-complementarity determining region (CDR) 1 comprises the amino acid sequence of TYAMN (SEQ ID NO:1); (ii) the first VH-CDR2 comprises the amino acid sequence of RIRSKYNNYATYYADSVKX₂, wherein X₂ is G or S (SEQ ID NO:7); (iii) the first VH-CDR3 comprises the amino acid sequence of HGNFGHSYVSWFAY (SEQ ID NO:8); (iv) the first VL-CDR1 comprises the amino acid sequence of GSSTGAVTTGHYAN (SEQ ID NO: 4); (v) the first VL-CDR2 comprises the amino acid sequence of GTSNRAP (SEQ ID NO:9); and (vi) the first VL-CDR3 comprises the amino acid sequence of ALWYSNRWV (SEQ ID NO:10). In some embodiments, the first VH-CDR1, the first VH-CDR2, the first VH-CDR3, the first VL-CDR1, the first VL-CDR2 and the first VL-CDR3 comprise the following amino acid sequences, respectively: SEQ ID NOs: 1, 11, 8, 4, 5 and 10; SEQ ID NOs: 1, 11, 8, 4, 9 and 10; SEQ ID NOs: 1, 12, 8, 4, 9 and 10; SEQ ID NOs: 1, 13, 8, 4, 14 and 15; SEQ ID NOs: 1, 13, 16, 4, 14 and 15; or SEQ ID NOs: 1, 11, 8, 4, 14 and 10. In some embodiments, the first VH-CDR1, the first VH-CDR2, the first VH-CDR3, the first VL-CDR1, the first VL-CDR2 and the first VL-CDR3 comprise the following amino acid sequences, respectively: SEQ ID NOs: 1, 11, 8, 4, 9 and 10; or SEQ ID NOs: 1, 12, 8, 4, 9 and 10. In some embodiments, the first VH-CDR1, the first VH-CDR2, the first VH-CDR3, the first VL-CDR1, the first VL-CDR2 and the first VL-CDR3 comprise the following amino acid sequences, respectively: SEQ ID NOs: 1, 11, 8, 4, 9 and 10. In some embodiments, the first VH-CDR1, the first VH-CDR2, the first VH-CDR3, the first VL-CDR1, the first VL-CDR2 and the first VL-CDR3 comprise the following amino acid sequences, respectively: SEQ ID NOs: 1, 12, 8, 4, 9 and 10.

[0087] In various embodiments, the first antigen binding domain, targeting or binding to, or specifically binding to human CD3, comprises a first heavy chain variable domain (VH) and a first light chain variable domain (VL), comprising: (i) a first VH-CDR1 comprising the amino acid sequence of GFTFNTY (SEQ ID NO:17); (ii) a first VH-CDR2 comprising the amino acid sequence of SKYNNY (SEQ ID NO:18); (iii) a first VH-CDR3 comprising the amino acid sequence of GNFGX₃SYVSWFA, wherein X₃ is H or N (SEQ ID NO:19); (iv) a first VL-CDR1 comprising the amino acid sequence of SSTGAVTTGHY (SEQ ID NO: 20); (v) a first VL-CDR2 comprising the amino acid sequence of GTX₄, wherein X₄ is N or S (SEQ ID NO:21); and (vi) a first VL-CDR3 comprising the amino acid sequence of WYSNX₆W, wherein X₆ is L or R (SEQ ID NO:22), wherein the first VH-CDR1, the first VH-CDR2, the first VH-CDR3, the first VL-CDR1, the first VL-CDR2, and the first VH-CDR3 are according to Chothia. In some embodiments, the first VH-CDR1, the first VH-CDR2, the first VH-CDR3, the first VL-CDR1, the first VL-CDR2 and the first VL-CDR3 comprise the following amino acid sequences, respectively: SEQ ID NOs: 17, 18, 23, 20, 21 and 25; SEQ ID NOs: 17, 18, 23, 20, 24 and 25; SEQ ID NOs: 17, 18, 23, 20, 26 and 27; SEQ ID NOs: 17, 18, 75, 20, 26 and 27; or SEQ ID NOs: 17, 18, 23, 20, 26 and 25. In some embodiments, the first VH-CDR1, the first VH-CDR2, the first VH-CDR3, the first VL-CDR1, the first VL-CDR2 and the first VL-CDR3 comprise the following amino acid sequences, respectively: SEQ ID NOs: 17, 18, 23, 20, 24 and 25.

[0088] In various embodiments, the first antigen binding domain, targeting or binding to, or specifically binding to human CD3, comprises a first heavy chain variable domain (VH) and a first light chain variable domain (VL), comprising: (i) a first VH-CDR1 comprising the amino acid sequence of GFTFNTYA (SEQ ID NO:28); (ii) a first VH-CDR2 comprising the amino acid sequence of IRSKYNNYAT (SEQ ID NO:29); (iii) a first VH-CDR3 comprising the amino acid sequence of VRHGNFGX₃SYVSWFAY, wherein X₃ is H or N (SEQ ID NO:30); (iv) a first VL-CDR1 comprising the amino acid sequence of TGAVTTGHY (SEQ ID NO:31); (v) a first VL-CDR2 comprising the amino acid sequence of GTX₄, wherein X₄ is N or S (SEQ ID NO:21); and (vi) a first VL-CDR3 comprising the amino acid sequence of ALWYSNX₆WV, wherein X₆ is L or R (SEQ ID NO:6), wherein the first VH-CDR1, the first VH-CDR2, the first VH-CDR3, the first VL-CDR1, the first VL-CDR2, and the first VH-CDR3 are according to IMGT. In some embodiments, the first VH-CDR1, the first VH-CDR2, the first VH-CDR3, the first VL-CDR1, the first VL-CDR2 and the first VL-CDR3 comprise the following amino acid sequences, respectively: SEQ ID NOs: 28, 29, 32, 31, 21 and 10; SEQ ID NOs: 28, 29, 32, 31, 24 and 10; SEQ ID NOs: 28, 29, 32, 31, 26 and 15; SEQ ID NOs: 28, 29, 33, 31, 26 and 15; or SEQ ID NOs: 28, 29, 32, 31, 26 and 10. In some embodiments, the first VH-CDR1, the first VH-CDR2, the first VH-CDR3, the first VL-CDR1, the first VL-CDR2 and the first VL-CDR3 comprise the following amino acid sequences, respectively: SEQ ID NOs: 28, 29, 32, 31, 24 and 10.

[0089] In various embodiments, the first antigen binding domain, targeting or binding to, or specifically binding to human CD3, comprises a first heavy chain variable domain (VH) and a first light chain variable domain (VL), comprising: (i) a first VH-CDR1 comprising the amino acid sequence of ASGFTFNTYA (SEQ ID NO:34); (ii) a first VH-CDR2 comprising the amino acid sequence of IRSKYNNYATYYAX₁SVKX₂R, wherein X₁ is A or D and X₂ is G or S (SEQ ID NO:35); (iii) a first VH-CDR3 comprising the amino acid sequence of HGNFGX₃SYVSWFA, X₃ is H or N (SEQ ID NO:36); (iv) a first VL-CDR1 comprising the amino acid sequence of SSTGAVTTGHY (SEQ ID NO: 37); (v) a first VL-CDR2 comprising the amino acid sequence of GTX₄NRAPX₇VPAR, wherein X₄ is N or S and X₇ is G or W (SEQ ID NO:38); and (vi) a first VL-CDR3 comprising the amino acid sequence of WYSNX₆W, wherein X₆ is L or R (SEQ ID NO:22), wherein the first VH-CDR1, the first VH-CDR2, the first VH-CDR3, the first VL-CDR1, the first VL-CDR2, and the first VH-CDR3 are according to Honegger. In some embodiments, (i) the first VH-CDR1 comprises the amino acid sequence of ASGFTFNTYA (SEQ ID NO:34); (ii) the first VH-CDR2 comprises the amino acid sequence of IRSKYNNYATYYADSVKX₂R, wherein X₂ is G or S (SEQ ID NO:39);
[0090] (iii) the first VH-CDR3 comprises the amino acid sequence of HGNFGHSYVSWFA (SEQ ID NO:40); (iv) the first VL-CDR1 comprises the amino acid sequence of SSTGAVTTGHY (SEQ ID NO: 37); (v) the first VL-CDR2 comprises the amino acid sequence of GTSNRAPGVPAR (SEQ ID NO:41); and (vi) the first VL-CDR3 comprises the amino acid sequence of WYSNRW (SEQ ID NO:25). In some embodiments, the first VH-CDR1, the first VH-CDR2, the first VH-CDR3, the first VL-CDR1, the first VL-CDR2 and the first VL-CDR3 comprise the following amino acid sequences, respectively: SEQ ID NOs: 34, 39, 40, 37, 41 and 25; SEQ ID NOs: 34, 42, 40, 37, 41 and 25; SEQ ID NOs: 34, 43, 40, 37, 41 and 25; SEQ ID NOs: 34, 44, 40, 37, 45 and 27; SEQ ID NOs: 34, 44, 46, 37, 45 and 27; or SEQ ID NOs: 34, 42, 40, 37, 47 and 25. In some embodiments, the first VH-CDR1, the first VH-CDR2, the first VH-CDR3, the first VL-CDR1, the first VL-CDR2 and the first VL-CDR3 comprise the following amino acid sequences, respectively: SEQ ID NOs: 34, 42, 40, 37, 41 and 25; or SEQ ID NOs: 34, 43, 40, 37, 41 and 25. In some embodiments, the first VH-CDR1, the first VH-CDR2, the first VH-CDR3, the first VL-CDR1, the first VL-CDR2 and the first VL-CDR3 comprise the following amino acid sequences, respectively: SEQ ID NOs: 34, 42, 40, 37, 41 and 25. In some embodiments, the first VH-CDR1, the first VH-CDR2, the first VH-CDR3, the first VL-CDR1, the first VL-CDR2 and the first VL-CDR3 comprise the following amino acid sequences, respectively: SEQ ID NOs: 34, 43, 40, 37, 41 and 25.

[0091] Illustrative sequences of complementarity determining regions (CDRs) of exemplary first antigen binding domains of the multi-specific antigen binding molecules, targeting human CD3, according to the Kabat definition, the Chothia definition, the IMGT definition and Honegger definition are provided in Tables A1, A2, A3 and A4, respectively. Multi-specific antigen binding molecules comprising the CDRs identified herein are encompassed by the present application. It is to be understood that this disclosure also encompasses multi-specific antigen binding molecules (e.g., anti-CD3/anti-HIV antigen bi-specific antibodies) comprising the CDRs according to any other CDR definition (e.g., Honegger definition, enhanced Chothia definition, Martin definition, Gelfand definition, AbM definition, contact definition, see, e.g., bioinf.org.uk/abs/#cdrdef and Dondelinger, et al., Front Immunol. (2018) 9:2278) of the anti-CD3/anti-HIV multi-specific antigen binding molecules disclosed herein.

TABLE A1
CDRs for anti-CD3 binding arm (Kabat)

| Ab | VH - | | | | | |
|---|---|---|---|---|---|---|
| Name | CDR1 | VH - CDR2 | VH - CDR3 | VL - CDR1 | VL - CDR2 | VL - CDR3 |
| 400 | TYAMN | RIRSKYNNYATYYAX₁SVKX₂ | HGNFGX₃SYVSWFAY | GSSTGAVTTGHYAN | GTX₄X₅RAP | ALWYSNX₆WV |
| | SEQ ID | X₁ is A or D | X₃ is H or N | SEQ ID NO: 4 | X₄X₅ is SN | X₆ is L or R |
| | NO: 1 | X₂ is G or S | SEQ ID NO: 3 | | or NK | SEQ ID NO: 6 |
| | | SEQ ID NO: 2 | | | SEQ ID NO: 5 | |
| 401 | TYAMN | RIRSKYNNYATYYADSVKX₂ | HGNFGHSYVSWFAY | GSSTGAVTTGHYAN | GTSNRAP | ALWYSNRWV |
| | SEQ ID | X₂ is G or S | SEQ ID NO: 8 | SEQ ID NO: 4 | SEQ ID NO: 9 | SEQ ID NO: 10 |
| | NO: 1 | SEQ ID NO: 7 | | | | |
| 402 | TYAMN | RIRSKYNNYATYYADSVKG | HGNFGHSYVSWFAY | GSSTGAVTTGHYAN | GTX₄X₅RAP | ALWYSNRWV |
| | SEQ ID | SEQ ID NO: 11 | SEQ ID NO: 8 | SEQ ID NO: 4 | X₄X₅ is SN | SEQ ID NO: 10 |
| | NO: 1 | | | | or NK | |
| | | | | | SEQ ID NO: 5 | |
| 403 | TYAMN | RIRSKYNNYATYYADSVKG | HGNFGHSYVSWFAY | GSSTGAVTTGHYAN | GTSNRAP | ALWYSNRWV |
| | SEQ ID | SEQ ID NO: 11 | SEQ ID NO: 8 | SEQ ID NO: 4 | SEQ ID NO: 9 | SEQ ID NO: 10 |
| | NO: 1 | | | | | |
| 404 | TYAMN | RIRSKYNNYATYYADSVKS | HGNFGHSYVSWFAY | GSSTGAVTTGHYAN | GTSNRAP | ALWYSNRWV |
| | SEQ ID | SEQ ID NO: 12 | SEQ ID NO: 8 | SEQ ID NO: 4 | SEQ ID NO: 9 | SEQ ID NO: 10 |
| | NO: 1 | | | | | |
| 405 | TYAMN | RIRSKYNNYATYYAASVKG | HGNFGHSYVSWFAY | GSSTGAVTTGHYAN | GTNKRAP | ALWYSNLWV |
| | SEQ ID | SEQ ID NO: 13 | SEQ ID NO: 8 | SEQ ID NO: 4 | SEQ ID NO: 14 | SEQ ID NO: 15 |
| | NO: 1 | | | | | |
| 406 | TYAMN | RIRSKYNNYATYYAASVKG | HGNFGNSYVSWFAY | GSSTGAVTTGHYAN | GTNKRAP | ALWYSNLWV |
| | SEQ ID | SEQ ID NO: 13 | SEQ ID NO: 16 | SEQ ID NO: 4 | SEQ ID NO: 14 | SEQ ID NO: 15 |
| | NO: 1 | | | | | |
| 407 | TYAMN | RIRSKYNNYATYYADSVKG | HGNFGHSYVSWFAY | GSSTGAVTTGHYAN | GTNKRAP | ALWYSNRWV |
| | SEQ ID | SEQ ID NO: 11 | SEQ ID NO: 8 | SEQ ID NO: 4 | SEQ ID NO: 14 | SEQ ID NO: 10 |
| | NO: 1 | | | | | |

TABLE A2
CDRs for anti-CD3 binding arm (Chothia)

| Ab | VH - | | | | | |
|---|---|---|---|---|---|---|
| Name | CDR1 | VH - CDR2 | VH - CDR3 | VL - CDR1 | VL - CDR2 | VL - CDR3 |
| 408 | GFTFNTY | SKYNNY | GNFGX₃SYVSWFA | SSTGAVTTGHY | GTX₄ | WYSNX₆W |
| | SEQ ID | SEQ ID NO: 18 | X₃ is H or N | SEQ ID NO: 20 | X₄ is N or S | X₆ is L or R |
| | NO: 17 | | SEQ ID NO: 19 | | SEQ ID NO: 21 | SEQ ID NO: 22 |
| 409 | GFTFNTY | SKYNNY | GNFGHSYVSWFA | SSTGAVTTGHY | GTX₄ | WYSNRW |
| | SEQ ID | SEQ ID NO: 18 | SEQ ID NO: 23 | SEQ ID NO: 20 | X₄ is N or S | SEQ ID NO: 25 |
| | NO: 17 | | | | SEQ ID NO: 21 | |
| 410 | GFTFNTY | SKYNNY | GNFGHSYVSWFA | SSTGAVTTGHY | GTS | WYSNRW |
| | SEQ ID | SEQ ID NO: 18 | SEQ ID NO: 23 | SEQ ID NO: 20 | SEQ ID NO: 24 | SEQ ID NO: 25 |
| | NO: 17 | | | | | |
| 411 | GFTFNTY | SKYNNY | GNFGHSYVSWFA | SSTGAVTTGHY | GTN | WYSNLW |
| | SEQ ID | SEQ ID NO: 18 | SEQ ID NO: 23 | SEQ ID NO: 20 | SEQ ID NO: 26 | SEQ ID NO: 27 |
| | NO: 17 | | | | | |
| 412 | GFTFNTY | SKYNNY | GNFGNSYVSWFA | SSTGAVTTGHY | GTN | WYSNLW |
| | SEQ ID | SEQ ID NO: 18 | SEQ ID NO: 75 | SEQ ID NO: 20 | SEQ ID NO: 26 | SEQ ID NO: 27 |
| | NO: 17 | | | | | |
| 413 | GFTFNTY | SKYNNY | GNFGHSYVSWFA | SSTGAVTTGHY | GTN | WYSNRW |
| | SEQ ID | SEQ ID NO: 18 | SEQ ID NO: 23 | SEQ ID NO: 20 | SEQ ID NO: 26 | SEQ ID NO: 25 |
| | NO: 17 | | | | | |

TABLE A3
CDRs for anti-CD3 binding arm (IMGT)

| Ab | | | | | | |
|---|---|---|---|---|---|---|
| Name | VH - CDR1 | VH - CDR2 | VH - CDR3 | VL - CDR1 | VL - CDR2 | VL - CDR3 |
| 414 | GFTFNTYA | IRSKYNNYAT | VRHGNFGX₃SYVSWFAY | TGAVTTGHY | GTX₄ | ALWYSNX₆WV |
| | SEQ ID | SEQ ID NO: | X₃ is H or N | SEQ ID | X₄ is N or S | X₆ is L or R |
| | NO: 28 | 29 | SEQ ID NO: 30 | NO: 31 | SEQ ID NO: 21 | SEQ ID NO: 6 |
| 415 | GFTFNTYA | IRSKYNNYAT | VRHGNFGHSYVSWFAY | TGAVTTGHY | GTX₄ | ALWYSNRWV |
| | SEQ ID | SEQ ID NO: | SEQ ID NO: 32 | SEQ ID | X₄ is N or S | SEQ ID NO: 10 |
| | NO: 28 | 29 | | NO: 31 | SEQ ID NO: 21 | |
| 416 | GFTFNTYA | IRSKYNNYAT | VRHGNFGHSYVSWFAY | TGAVTTGHY | GTS | ALWYSNRWV |
| | SEQ ID | SEQ ID NO: | SEQ ID NO: 32 | SEQ ID | SEQ ID NO: 24 | SEQ ID NO: 10 |
| | NO: 28 | 29 | | NO: 31 | | |
| 417 | GFTFNTYA | IRSKYNNYAT | VRHGNFGHSYVSWFAY | TGAVTTGHY | GTN | ALWYSNLWV |
| | SEQ ID | SEQ ID NO: | SEQ ID NO: 32 | SEQ ID | SEQ ID NO: 26 | SEQ ID NO: 15 |
| | NO: 28 | 29 | | NO: 31 | | |
| 418 | GFTFNTYA | IRSKYNNYAT | VRHGNFGNSYVSWFAY | TGAVTTGHY | GTN | ALWYSNLWV |
| | SEQ ID | SEQ ID NO: | SEQ ID NO: 33 | SEQ ID | SEQ ID NO: 26 | SEQ ID NO: 15 |
| | NO: 28 | 29 | | NO: 31 | | |
| 419 | GFTFNTYA | IRSKYNNYAT | VRHGNFGHSYVSWFAY | TGAVTTGHY | GTN | ALWYSNRWV |
| | SEQ ID | SEQ ID NO: | SEQ ID NO: 32 | SEQ ID | SEQ ID NO: 26 | SEQ ID NO: 10 |
| | NO: 28 | 29 | | NO: 31 | | |

TABLE A4
CDRs for anti-CD3 binding arm (Honegger)

| Ab | | | | | | |
|---|---|---|---|---|---|---|
| Name | VH - CDR1 | VH - CDR2 | VH - CDR3 | VL - CDR1 | VL - CDR2 | VL - CDR3 |
| 420 | ASGFTFNTYA | IRSKYNNYATYYAX₁SVKX₂R | HGNFGX₃SYVSWFA | SSTGAVTTGHY | GTX₄NRAPX₇VPAR | WYSNX₆W |
| | SEQ ID | X₁ is A or D | X₃ is H or N | SEQ ID NO: | X₄ is N or S | X₆ is L or R |
| | NO: 34 | X₂ is G or S | SEQ ID NO: 36 | 37 | X₇ is G or W | SEQ ID NO: |
| | | SEQ ID NO: 35 | | | SEQ ID NO: 38 | 22 |
| 421 | ASGFTFNTYA | IRSKYNNYATYYADSVKX₂R | HGNFGHSYVSWFA | SSTGAVTTGHY | GTSNRAPGVPAR | WYSNRW |
| | SEQ ID | X₂ is G or S | SEQ ID NO: 40 | SEQ ID NO: | SEQ ID NO: 41 | SEQ ID NO: |
| | NO: 34 | SEQ ID NO: 39 | | 37 | | 25 |
| 422 | ASGFTFNTYA | IRSKYNNYATYYADSVKX₂R | HGNFGHSYVSWFA | SSTGAVTTGHY | GTSNRAPGVPAR | WYSNRW |
| | SEQ ID | X₂ is G or S | SEQ ID NO: 40 | SEQ ID NO: | SEQ ID NO: 41 | SEQ ID NO: |
| | NO: 34 | SEQ ID NO: 39 | | 37 | | 25 |
| 423 | ASGFTFNTYA | IRSKYNNYATYYADSVKGR | HGNFGHSYVSWFA | SSTGAVTTGHY | GTSNRAPGVPAR | WYSNRW |
| | SEQ ID | SEQ ID NO: 42 | SEQ ID NO: 40 | SEQ ID NO: | SEQ ID NO: 41 | SEQ ID NO: |
| | NO: 34 | | | 37 | | 25 |
| 424 | ASGFTFNTYA | IRSKYNNYATYYADSVKSR | HGNFGHSYVSWFA | SSTGAVTTGHY | GTSNRAPGVPAR | WYSNRW |
| | SEQ ID | SEQ ID NO: 43 | SEQ ID NO: 40 | SEQ ID NO: | SEQ ID NO: 41 | SEQ ID NO: |
| | NO: 34 | | | 37 | | 25 |
| 425 | ASGFTFNTYA | IRSKYNNYATYYAASVKGR | HGNFGHSYVSWFA | SSTGAVTTGHY | GTNKRAPWTPAR | WYSNLW |
| | SEQ ID | SEQ ID NO: 44 | SEQ ID NO: 40 | SEQ ID NO: | SEQ ID NO: 45 | SEQ ID NO: |
| | NO: 34 | | | 37 | | 27 |
| 426 | ASGFTFNTYA | IRSKYNNYATYYAASVKGR | HGNFGNSYVSWFA | SSTGAVTTGHY | GTNKRAPWTPAR | WYSNLW |
| | SEQ ID | SEQ ID NO: 44 | SEQ ID NO: 46 | SEQ ID NO: | SEQ ID NO: 45 | SEQ ID NO: |
| | NO: 34 | | | 37 | | 27 |
| 427 | ASGFTFNTYA | IRSKYNNYATYYADSVKGR | HGNFGHSYVSWFA | SSTGAVTTGHY | GTNKRAPGVPAR | WYSNRW |
| | SEQ ID | SEQ ID NO: 42 | SEQ ID NO: 40 | SEQ ID NO: | SEQ ID NO: 47 | SEQ ID NO: |
| | NO: 34 | | | 37 | | 25 |

[0092] Additionally, it has been reported that heavy chain variable domains derived from VH3 family germlines can exhibit direct binding to Protein A affinity chromatography resins (Bach, et al., J Chromatogr A. (2015) 1409:60-9). Accordingly, in certain embodiments, to reduce, or substantially or completely eliminate, binding to Protein A by one heavy chain-containing subunit of a multi-specific or bispecific antigen binding molecule, a H435R or H435R+Y436F mutation in the Fc region of the first or second heavy chain can be combined with one or more amino acid substitutions in the VH of the same heavy chain, should that VH region be derived from a human VH3 family germline. In some embodiments, the first VH (and/or a second VH derived from a human VH3 family germline) comprises one or more of the following amino acids at the indicated positions (as described herein, numbering of amino acid positions for substitutions in the first and second VH and VL regions is according to Kabat): the position corresponding to 19 is A, S, T or K; the position corresponding to 57 is A, E or T; the position corresponding to 65 is G, S or T; the position corresponding to 81 is E, K or T; and the position corresponding to 82a is S, T or R. In some embodiments, the first (and/or a second VH derived from a human VH3 family germline) VH comprises one or more of the following amino acids at the indicated positions (position numbering according to Kabat): the position corresponding to 19 is A or S; the position corresponding to 57 is A or E; the position corresponding to 65 is S; and the position corresponding to 81 is E. In some embodiments, the first VH (and/or a second VH derived from a human VH3 family germline) comprises one or more of the following amino acids at the indicated positions (position numbering according to Kabat): the position corresponding to 19 is S and the position corresponding to 57 is A; the position corresponding to 19 is A or S and the position corresponding to 57 is E; the position corresponding to 19 is A and the position corresponding to 57 is E; the position corresponding to 19 is S and the position corresponding to 57 is E; the position corresponding to 19 is S and the position corresponding to 65 is S; the position corresponding to 19 is S and the position corresponding to 81 is E; the position corresponding to 19 is K and the position corresponding to 81 is E; the position corresponding to 57 is A and the position corresponding to 81 is E; the position corresponding to 57 is A and the position corresponding to 65 is S; the position corresponding to 57 is E and the position corresponding to 65 is S; the position corresponding to 57 is E and the position corresponding to 81 is E; the position corresponding to 65 is S and the position corresponding to 81 is E; or the position corresponding to 81 is E and the position corresponding to 82a is S.

[0093] In some embodiments, the first antigen binding domain has reduced or insignificant or substantially no binding to Protein A, or does not detectably bind to Protein A. In some embodiments, the first antigen binding domain binds to Protein A with a K_{D} of greater than 10⁻⁶ M. Protein binding affinity can be determined by any method known in the art, e.g., by surface plasmon resonance (SPR), e.g., using Octet as described herein.

[0094] As used herein, numbering of a given amino acid polymer or nucleic acid polymer “corresponds to”, is “corresponding to” or is “relative to” the numbering of a selected or reference amino acid polymer or nucleic acid polymer when the position of any given polymer component (e.g., amino acid, nucleotide, also referred to generically as a “residue”) is designated by reference to the same or to an equivalent position (e.g., based on an optimal alignment or a consensus sequence) in the selected amino acid or nucleic acid polymer, rather than by the actual numerical position of the component in the given polymer.

[0095] In some embodiments, the first VH and the first VL comprise one or more of the following amino acid substitutions (numbering according to Kabat): position 81 of the first VH is Q or E; position 83 of the first VH is K or R; position 89 of the first VH is M or V; position 100 of the first VH is H; position 57 of the first VL is G or W; and/or position 75 of the first VL is I or L. In some embodiments, position 81 of the first VH is Q or E. In some embodiments, position 81 of the first VH is E. In some embodiments, position 81 of the first VH is Q. In some embodiments, one or more of position 81 of the first VH is Q or E; position 83 of the first VH is R; position 89 of the first VH is V; position 100 of the first VH is H; position 57 of the first VL is G; and/or position 75 of the first VL is I.

[0096] In some embodiments, the first VH comprises an amino acid sequence that is at least 80%, at least 85%, at least 90%, at least 91%, at least 92%, at least 93%, at least 94%, at least 95%, at least 96%, at least 97%, at least 98%, at least 99% identical, or is 100% identical, to an amino acid sequence selected from the group consisting of SEQ ID NOs: 48-53. In some embodiments, the first VH comprises an amino acid sequence that is at least 80%, at least 85%, at least 90%, at least 91%, at least 92%, at least 93%, at least 94%, at least 95%, at least 96%, at least 97%, at least 98%, or at least 99% identical to the amino acid sequence of SEQ ID NO: 50. In some embodiments, the first VH comprises the amino acid sequence of SEQ ID NO: 50. In some embodiments, the first VH comprises an amino acid sequence that is at least 80%, at least 85%, at least 90%, at least 91%, at least 92%, at least 93%, at least 94%, at least 95%, at least 96%, at least 97%, at least 98%, or at least 99% identical to the amino acid sequence of SEQ ID NO: 51. In some embodiments, the first VH comprises the amino acid sequence of SEQ ID NO: 51. In some embodiments, the first VL comprises an amino acid sequence that is at least 80%, at least 85%, at least 90%, at least 91%, at least 92%, at least 93%, at least 94%, at least 95%, at least 96%, at least 97%, at least 98%, at least 99% identical, or is 100% identical, to an amino acid sequence of SEQ ID NO: 54-58. In some embodiments, the first VL comprises an amino acid sequence that is at least 80%, at least 85%, at least 90%, at least 91%, at least 92%, at least 93%, at least 94%, at least 95%, at least 96%, at least 97%, at least 98%, or at least 99% identical to the amino acid sequence of SEQ ID NO: 56. In some embodiments, the first VL comprises the amino acid sequence of SEQ ID NO: 56. In some embodiments, the first VH comprises an amino acid sequence that is at least 80%, at least 85%, at least 90%, at least 91%, at least 92%, at least 93%, at least 94%, at least 95%, at least 96%, at least 97%, at least 98%, at least 99% identical, or is 100% identical, to an amino acid sequence selected from the group consisting of SEQ ID NOs: 48-53 and wherein the first VL comprises an amino acid sequence that is at least 80%, at least 85%, at least 90%, at least 91%, at least 92%, at least 93%, at least 94%, at least 95%, at least 96%, at least 97%, at least 98%, at least 99% identical, or is 100% identical, to an amino acid sequence of SEQ ID NO: 54-58.

[0097] In some embodiments, the first VH comprises an amino acid sequence that is at least 80%, at least 85%, at least 90%, at least 91%, at least 92%, at least 93%, at least 94%, at least 95%, at least 96%, at least 97%, at least 98%, or at least 99% identical to the amino acid sequence of SEQ ID NO: 50 and wherein the first VL comprises an amino acid sequence that is at least 80%, at least 85%, at least 90%, at least 91%, at least 92%, at least 93%, at least 94%, at least 95%, at least 96%, at least 97%, at least 98%, or at least 99% identical to the amino acid sequence of SEQ ID NO: 56. In some embodiments, the first VH comprises the amino acid sequence of SEQ ID NO: 50 and the first VL comprises an amino acid sequence that is at least 95% identical to the amino acid sequence of SEQ ID NO: 56. In some embodiments, the first VH comprises the amino acid sequence of SEQ ID NO: 50 and the first VL comprises an amino acid sequence that is at least 96% identical to the amino acid sequence of SEQ ID NO: 56. In some embodiments, the first VH comprises the amino acid sequence of SEQ ID NO: 50 and the first VL comprises an amino acid sequence that is at least 97% identical to the amino acid sequence of SEQ ID NO: 56. In some embodiments, the first VH comprises the amino acid sequence of SEQ ID NO: 50 and the first VL comprises an amino acid sequence that is at least 98% identical to the amino acid sequence of SEQ ID NO: 56. In some embodiments, the first VH comprises the amino acid sequence of SEQ ID NO: 50 and the first VL comprises an amino acid sequence that is at least 99% identical to the amino acid sequence of SEQ ID NO: 56. In some embodiments, the first VH comprises an amino acid sequence that is at least 95% identical to the amino acid sequence of SEQ ID NO: 50 and the first VL comprises the amino acid sequence of SEQ ID NO: 56. In some embodiments, the first VH comprises an amino acid sequence that is at least 96% identical to the amino acid sequence of SEQ ID NO: 50 and the first VL comprises the amino acid sequence of SEQ ID NO: 56. In some embodiments, the first VH comprises an amino acid sequence that is at least 97% identical to the amino acid sequence of SEQ ID NO: 50 and the first VL comprises the amino acid sequence of SEQ ID NO: 56. In some embodiments, the first VH comprises an amino acid sequence that is at least 98% identical to the amino acid sequence of SEQ ID NO: 50 and the first VL comprises the amino acid sequence of SEQ ID NO: 56. In some embodiments, the first VH comprises an amino acid sequence that is at least 99% identical to the amino acid sequence of SEQ ID NO: 50 and the first VL comprises the amino acid sequence of SEQ ID NO: 56.

[0098] In some embodiments, the first VH comprises an amino acid sequence that is at least 80%, at least 85%, at least 90%, at least 91%, at least 92%, at least 93%, at least 94%, at least 95%, at least 96%, at least 97%, at least 98%, or at least 99% identical to the amino acid sequence of SEQ ID NO: 51 and wherein the first VL comprises an amino acid sequence that is at least 80%, at least 85%, at least 90%, at least 91%, at least 92%, at least 93%, at least 94%, at least 95%, at least 96%, at least 97%, at least 98%, or at least 99% identical to the amino acid sequence of SEQ ID NO: 56. In some embodiments, the first VH comprises the amino acid sequence of SEQ ID NO: 51 and the first VL comprises an amino acid sequence that is at least 95% identical to the amino acid sequence of SEQ ID NO: 56. In some embodiments, the first VH comprises the amino acid sequence of SEQ ID NO: 51 and the first VL comprises an amino acid sequence that is at least 96% identical to the amino acid sequence of SEQ ID NO: 56. In some embodiments, the first VH comprises the amino acid sequence of SEQ ID NO: 51 and the first VL comprises an amino acid sequence that is at least 97% identical to the amino acid sequence of SEQ ID NO: 56. In some embodiments, the first VH comprises the amino acid sequence of SEQ ID NO: 51 and the first VL comprises an amino acid sequence that is at least 98% identical to the amino acid sequence of SEQ ID NO: 56. In some embodiments, the first VH comprises the amino acid sequence of SEQ ID NO: 51 and the first VL comprises an amino acid sequence that is at least 99% identical to the amino acid sequence of SEQ ID NO: 56. In some embodiments, the first VH comprises an amino acid sequence that is at least 95% identical to the amino acid sequence of SEQ ID NO: 51 and the first VL comprises the amino acid sequence of SEQ ID NO: 56. In some embodiments, the first VH comprises an amino acid sequence that is at least 96% identical to the amino acid sequence of SEQ ID NO: 51 and the first VL comprises the amino acid sequence of SEQ ID NO: 56. In some embodiments, the first VH comprises an amino acid sequence that is at least 97% identical to the amino acid sequence of SEQ ID NO: 51 and the first VL comprises the amino acid sequence of SEQ ID NO: 56. In some embodiments, the first VH comprises an amino acid sequence that is at least 98% identical to the amino acid sequence of SEQ ID NO: 51 and the first VL comprises the amino acid sequence of SEQ ID NO: 56. In some embodiments, the first VH comprises an amino acid sequence that is at least 99% identical to the amino acid sequence of SEQ ID NO: 51 and the first VL comprises the amino acid sequence of SEQ ID NO: 56.

[0099] In various embodiments, the first VH and the first VL comprise the amino acid sequences set forth, respectively, or comprise amino acid sequences that are at least 80%, at least 85%, at least 90%, at least 91%, at least 92%, at least 93%, at least 94%, at least 95%, at least 96%, at least 97%, at least 98%, or at least 99% identical to the amino acid sequences set forth, respectively: SEQ ID NOs: 48 and 54; SEQ ID NOs: 49 and 55; SEQ ID NOs: 50 and 55; SEQ ID NOs: 50 and 56; SEQ ID NOs: 51 and 55; SEQ ID NOs: 51 and 56; SEQ ID NOs: 52 and 56; SEQ ID NOs: 53 and 57; or SEQ ID NOs: 50 and 58. In various embodiments, the first VH and the first VL comprise the amino acid sequences set forth, respectively, or comprise amino acid sequences that are at least 80%, at least 85%, at least 90%, at least 91%, at least 92%, at least 93%, at least 94%, at least 95%, at least 96%, at least 97%, at least 98%, or at least 99% identical to the amino acid sequences set forth, respectively: SEQ ID NOs: 49 and 55; SEQ ID NOs: 50 and 55; SEQ ID NOs: 50 and 56; SEQ ID NOs: 51 and 55; or SEQ ID NOs: 51 and 56. In various embodiments, the first VH and the first VL comprise the amino acid sequences set forth, respectively, or comprise amino acid sequences that are at least 80%, at least 85%, at least 90%, at least 91%, at least 92%, at least 93%, at least 94%, at least 95%, at least 96%, at least 97%, at least 98%, or at least 99% identical to the amino acid sequences set forth, respectively: SEQ ID NOs: 50 and 56; or SEQ ID NOs: 51 and 56. In some embodiments, position 100 of the first VH (numbering according to Kabat) is a histidine (H).

[0100] In some embodiments, the first VH comprises an amino acid sequence that is at least 80%, at least 85%, at least 90%, at least 91%, at least 92%, at least 93%, at least 94%, at least 95%, at least 96%, at least 97%, at least 98%, or at least 99% identical to the amino acid sequence of SEQ ID NO: 50 and wherein the first VL comprises an amino acid sequence that is at least 80%, at least 85%, at least 90%, at least 91%, at least 92%, at least 93%, at least 94%, at least 95%, at least 96%, at least 97%, at least 98%, or at least 99% identical to the amino acid sequence of SEQ ID NO: 56. In some embodiments, the first VH comprises the amino acid sequence of SEQ ID NO: 50 and the first VL comprises an amino acid sequence that is at least 95% identical to the amino acid sequence of SEQ ID NO: 56. In some embodiments, the first VH comprises the amino acid sequence of SEQ ID NO: 50 and the first VL comprises an amino acid sequence that is at least 96% identical to the amino acid sequence of SEQ ID NO: 56. In some embodiments, the first VH comprises the amino acid sequence of SEQ ID NO: 50 and the first VL comprises an amino acid sequence that is at least 97% identical to the amino acid sequence of SEQ ID NO: 56. In some embodiments, the first VH comprises the amino acid sequence of SEQ ID NO: 50 and the first VL comprises an amino acid sequence that is at least 98% identical to the amino acid sequence of SEQ ID NO: 56. In some embodiments, the first VH comprises the amino acid sequence of SEQ ID NO: 50 and the first VL comprises an amino acid sequence that is at least 99% identical to the amino acid sequence of SEQ ID NO: 56. In some embodiments, the first VH comprises an amino acid sequence that is at least 95% identical to the amino acid sequence of SEQ ID NO: 50 and the first VL comprises the amino acid sequence of SEQ ID NO: 56. In some embodiments, the first VH comprises an amino acid sequence that is at least 96% identical to the amino acid sequence of SEQ ID NO: 50 and the first VL comprises the amino acid sequence of SEQ ID NO: 56. In some embodiments, the first VH comprises an amino acid sequence that is at least 97% identical to the amino acid sequence of SEQ ID NO: 50 and the first VL comprises the amino acid sequence of SEQ ID NO: 56. In some embodiments, the first VH comprises an amino acid sequence that is at least 98% identical to the amino acid sequence of SEQ ID NO: 50 and the first VL comprises the amino acid sequence of SEQ ID NO: 56. In some embodiments, the first VH comprises an amino acid sequence that is at least 99% identical to the amino acid sequence of SEQ ID NO: 50 and the first VL comprises the amino acid sequence of SEQ ID NO: 56. In some embodiments, the first VH and the first VL comprise amino acid sequences that are at least 80%, at least 85%, at least 90%, at least 91%, at least 92%, at least 93%, at least 94%, at least 95%, at least 96%, at least 97%, at least 98%, or at least 99% identical to the amino acid sequences set forth, respectively: SEQ ID NOs: 50 and 56. In some embodiments, the first VH and the first VL comprise amino acid sequences that are at least 95% identical to the amino acid sequences set forth, respectively: SEQ ID NOs: 50 and 56. In some embodiments, the first VH and the first VL comprise amino acid sequences that are at least 99% identical to the amino acid sequences set forth, respectively: SEQ ID NOs: 50 and 56. In some embodiments, the first VH and the first VL comprise the amino acid sequences set forth, respectively: SEQ ID NOs: 50 and 56. In some embodiments, the first VH-CDR1, the first VH-CDR2, the first VH-CDR3, the first VL-CDR1, the first VL-CDR2 and the first VL-CDR3 comprise the following amino acid sequences, respectively (according to Kabat): SEQ ID NOs: 1, 11, 8, 4, 9 and 10, and the first VH and the first VL comprise amino acid sequences that are at least 95% identical to the amino acid sequences set forth, respectively: SEQ ID NOs: 50 and 56. In some embodiments, the first VH-CDR1, the first VH-CDR2, the first VH-CDR3, the first VL-CDR1, the first VL-CDR2 and the first VL-CDR3 comprise the following amino acid sequences, respectively (according to Kabat): SEQ ID NOs: 1, 11, 8, 4, 9 and 10, and the first VH and the first VL comprise amino acid sequences that are at least 99% identical to the amino acid sequences set forth, respectively: SEQ ID NOs: 50 and 56. In some embodiments, the first VH-CDR1, the first VH-CDR2, the first VH-CDR3, the first VL-CDR1, the first VL-CDR2 and the first VL-CDR3 comprise the following amino acid sequences, respectively (according to Chothia): SEQ ID NOs: 17, 18, 23, 20, 24 and 25, and the first VH and the first VL comprise amino acid sequences that are at least 95% identical to the amino acid sequences set forth, respectively: SEQ ID NOs: 50 and 56. In some embodiments, the first VH-CDR1, the first VH-CDR2, the first VH-CDR3, the first VL-CDR1, the first VL-CDR2 and the first VL-CDR3 comprise the following amino acid sequences, respectively (according to Chothia): SEQ ID NOs: 17, 18, 23, 20, 24 and 25, and the first VH and the first VL comprise amino acid sequences that are at least 99% identical to the amino acid sequences set forth, respectively: SEQ ID NOs: 50 and 56. In some embodiments, the first VH-CDR1, the first VH-CDR2, the first VH-CDR3, the first VL-CDR1, the first VL-CDR2 and the first VL-CDR3 comprise the following amino acid sequences, respectively (according to IMGT): SEQ ID NOs: 28, 29, 32, 31, 24 and 10, and the first VH and the first VL comprise amino acid sequences that are at least 95% identical to the amino acid sequences set forth, respectively: SEQ ID NOs: 50 and 56. In some embodiments, the first VH-CDR1, the first VH-CDR2, the first VH-CDR3, the first VL-CDR1, the first VL-CDR2 and the first VL-CDR3 comprise the following amino acid sequences, respectively (according to IMGT): SEQ ID NOs: 28, 29, 32, 31, 24 and 10, and the first VH and the first VL comprise amino acid sequences that are at least 99% identical to the amino acid sequences set forth, respectively: SEQ ID NOs: 50 and 56. In some embodiments, the first VH-CDR1, the first VH-CDR2, the first VH-CDR3, the first VL-CDR1, the first VL-CDR2 and the first VL-CDR3 comprise the following amino acid sequences, respectively (according to Honegger): SEQ ID NOs: 34, 42, 40, 37, 41 and 25, and the first VH and the first VL comprise amino acid sequences that are at least 95% identical to the amino acid sequences set forth, respectively: SEQ ID NOs: 50 and 56. In some embodiments, the first VH-CDR1, the first VH-CDR2, the first VH-CDR3, the first VL-CDR1, the first VL-CDR2 and the first VL-CDR3 comprise the following amino acid sequences, respectively (according to Honegger): SEQ ID NOs: 34, 42, 40, 37, 41 and 25, and the first VH and the first VL comprise amino acid sequences that are at least 99% identical to the amino acid sequences set forth, respectively: SEQ ID NOs: 50 and 56.

[0101] In some embodiments, the first VH comprises an amino acid sequence that is at least 80%, at least 85%, at least 90%, at least 91%, at least 92%, at least 93%, at least 94%, at least 95%, at least 96%, at least 97%, at least 98%, or at least 99% identical to the amino acid sequence of SEQ ID NO: 51 and wherein the first VL comprises an amino acid sequence that is at least 80%, at least 85%, at least 90%, at least 91%, at least 92%, at least 93%, at least 94%, at least 95%, at least 96%, at least 97%, at least 98%, or at least 99% identical to the amino acid sequence of SEQ ID NO: 56. In some embodiments, the first VH comprises the amino acid sequence of SEQ ID NO: 51 and the first VL comprises an amino acid sequence that is at least 95% identical to the amino acid sequence of SEQ ID NO: 56. In some embodiments, the first VH comprises the amino acid sequence of SEQ ID NO: 51 and the first VL comprises an amino acid sequence that is at least 96% identical to the amino acid sequence of SEQ ID NO: 56. In some embodiments, the first VH comprises the amino acid sequence of SEQ ID NO: 51 and the first VL comprises an amino acid sequence that is at least 97% identical to the amino acid sequence of SEQ ID NO: 56. In some embodiments, the first VH comprises the amino acid sequence of SEQ ID NO: 51 and the first VL comprises an amino acid sequence that is at least 98% identical to the amino acid sequence of SEQ ID NO: 56. In some embodiments, the first VH comprises the amino acid sequence of SEQ ID NO: 51 and the first VL comprises an amino acid sequence that is at least 99% identical to the amino acid sequence of SEQ ID NO: 56. In some embodiments, the first VH comprises an amino acid sequence that is at least 95% identical to the amino acid sequence of SEQ ID NO: 51 and the first VL comprises the amino acid sequence of SEQ ID NO: 56. In some embodiments, the first VH comprises an amino acid sequence that is at least 96% identical to the amino acid sequence of SEQ ID NO: 51 and the first VL comprises the amino acid sequence of SEQ ID NO: 56. In some embodiments, the first VH comprises an amino acid sequence that is at least 97% identical to the amino acid sequence of SEQ ID NO: 51 and the first VL comprises the amino acid sequence of SEQ ID NO: 56. In some embodiments, the first VH comprises an amino acid sequence that is at least 98% identical to the amino acid sequence of SEQ ID NO: 51 and the first VL comprises the amino acid sequence of SEQ ID NO: 56. In some embodiments, the first VH comprises an amino acid sequence that is at least 99% identical to the amino acid sequence of SEQ ID NO: 51 and the first VL comprises the amino acid sequence of SEQ ID NO: 56. In some embodiments, the first VH and the first VL comprise amino acid sequences that are at least 80%, at least 85%, at least 90%, at least 91%, at least 92%, at least 93%, at least 94%, at least 95%, at least 96%, at least 97%, at least 98%, or at least 99% identical to the amino acid sequences set forth, respectively: SEQ ID NOs: 51 and 56. In some embodiments, the first VH and the first VL comprise amino acid sequences that are at least 95% identical to the amino acid sequences set forth, respectively: SEQ ID NOs: 51 and 56. In some embodiments, the first VH and the first VL comprise amino acid sequences that are at least 99% identical to the amino acid sequences set forth, respectively: SEQ ID NOs: 51 and 56. In some embodiments, the first VH and the first VL comprise the amino acid sequences set forth, respectively: SEQ ID NOs: 51 and 56. In some embodiments, the first VH-CDR1, the first VH-CDR2, the first VH-CDR3, the first VL-CDR1, the first VL-CDR2 and the first VL-CDR3 comprise the following amino acid sequences, respectively (according to Kabat): SEQ ID NOs: 1, 12, 8, 4, 9 and 10, and the first VH and the first VL comprise amino acid sequences that are at least 95% identical to the amino acid sequences set forth, respectively: SEQ ID NOs: 51 and 56. In some embodiments, the first VH-CDR1, the first VH-CDR2, the first VH-CDR3, the first VL-CDR1, the first VL-CDR2 and the first VL-CDR3 comprise the following amino acid sequences, respectively (according to Kabat): SEQ ID NOs: 1, 12, 8, 4, 9 and 10, and the first VH and the first VL comprise amino acid sequences that are at least 99% identical to the amino acid sequences set forth, respectively: SEQ ID NOs: 51 and 56. In some embodiments, the first VH-CDR1, the first VH-CDR2, the first VH-CDR3, the first VL-CDR1, the first VL-CDR2 and the first VL-CDR3 comprise the following amino acid sequences, respectively (according to Chothia): SEQ ID NOs: 17, 18, 23, 20, 24 and 25, and the first VH and the first VL comprise amino acid sequences that are at least 95% identical to the amino acid sequences set forth, respectively: SEQ ID NOs: 51 and 56. In some embodiments, the first VH-CDR1, the first VH-CDR2, the first VH-CDR3, the first VL-CDR1, the first VL-CDR2 and the first VL-CDR3 comprise the following amino acid sequences, respectively (according to Chothia): SEQ ID NOs: 17, 18, 23, 20, 24 and 25, and the first VH and the first VL comprise amino acid sequences that are at least 99% identical to the amino acid sequences set forth, respectively: SEQ ID NOs: 51 and 56. In some embodiments, the first VH-CDR1, the first VH-CDR2, the first VH-CDR3, the first VL-CDR1, the first VL-CDR2 and the first VL-CDR3 comprise the following amino acid sequences, respectively (according to IMGT): SEQ ID NOs: 28, 29, 32, 31, 24 and 10, and the first VH and the first VL comprise amino acid sequences that are at least 95% identical to the amino acid sequences set forth, respectively: SEQ ID NOs: 51 and 56. In some embodiments, the first VH-CDR1, the first VH-CDR2, the first VH-CDR3, the first VL-CDR1, the first VL-CDR2 and the first VL-CDR3 comprise the following amino acid sequences, respectively (according to IMGT): SEQ ID NOs: 28, 29, 32, 31, 24 and 10, and the first VH and the first VL comprise amino acid sequences that are at least 99% identical to the amino acid sequences set forth, respectively: SEQ ID NOs: 51 and 56. In some embodiments, the first VH-CDR1, the first VH-CDR2, the first VH-CDR3, the first VL-CDR1, the first VL-CDR2 and the first VL-CDR3 comprise the following amino acid sequences, respectively (according to Honegger): SEQ ID NOs: 34, 43, 40, 37, 41 and 25, and the first VH and the first VL comprise amino acid sequences that are at least 95% identical to the amino acid sequences set forth, respectively: SEQ ID NOs: 51 and 56. In some embodiments, the first VH-CDR1, the first VH-CDR2, the first VH-CDR3, the first VL-CDR1, the first VL-CDR2 and the first VL-CDR3 comprise the following amino acid sequences, respectively (according to Honegger): SEQ ID NOs: 34, 43, 40, 37, 41 and 25, and the first VH and the first VL comprise amino acid sequences that are at least 99% identical to the amino acid sequences set forth, respectively: SEQ ID NOs: 51 and 56.

[0102] Illustrative sequences of the VH and VL of the first antigen binding domains of the multi-specific antigen binding molecules, targeting human CD3, are provided in Tables B1 and B2.

TABLE B1

| SEQ | |
|---|---|
| ID | |
| NO: | anti-CD3 binding HC variable regions (VH) |
| 48 | EVQLVESGGGLVQPGGSLRLSCAASGFTFNTYAMNWVRQAPGKGL |
| | EWVGRIRSKYNNYATYYAX₁SVKX₂RFTISRDDSKNSLYLX₈MNSL |
| | X₉TEDTAX₁₀YYCVRHGNFGX₃SYVSWFAYWGQGTLVTVSS |
| | X₁ is A or D; |
| | X₂ is G or S; |
| | X₃ is H or N; |
| | X₈ is E or Q; |
| | X₉ is K or R; and |
| | X₁₀ is M or V |
| 49 | EVQLVESGGGLVQPGGSLRLSCAASGFTFNTYAMNWVRQAPGKGL |
| | EWVGRIRSKYNNYATYYADSVKX₂RFTISRDDSKNSLYLX₈MNSL |
| | RTEDTAVYYCVRHGNFGHSYVSWFAYWGQGTLVTVSS |
| | X₂ is G or S; and |
| | X₈ is E or Q |
| 50 | EVQLVESGGGLVQPGGSLRLSCAASGFTFNTYAMNWVRQAPGKG |
| VH3 | LEWVGRIRSKYNNYATYYADSVKGRFTISRDDSKNSLYLQMNSL |
| | RTEDTAVYYCVRHGNFGHSYVSWFAYWGQGTLVTVSS |
| 51 | EVQLVESGGGLVQPGGSLRLSCAASGFTFNTYAMNWVRQAPGKG |
| VH39 | LEWVGRIRSKYNNYATYYADSVKSRFTISRDDSKNSLYLEMNSL |
| | RTEDTAVYYCVRHGNFGHSYVSWFAYWGQGTLVTVSS |
| 52 | EVQLVESGGGLVQPGGSLRLSCAASGFTFNTYAMNWVRQAPGKG |
| VH34 | LEWVGRIRSKYNNYATYYAASVKGRFTISRDDSKNSLYLQMNSL |
| | KTEDTAMYYCVRHGNFGHSYVSWFAYWGQGTLVTVSS |
| 53 | EVQLVESGGGLVQPGGSLRLSCAASGFTFNTYAMNWVRQAPGKG |
| VH1 | LEWVGRIRSKYNNYATYYAASVKGRFTISRDDSKNSLYLQMNSL |
| | KTEDTAMYYCVRHGNFGNSYVSWFAYWGQGTLVTVSS |

TABLE B2

| SEQ | |
|---|---|
| ID | |
| NO: | anti-CD3 binding LC variable regions (VL) |
| 54 | QAVVTQEPSLTVSPGGIVTLICGSSTGAVTTGHYANWVQQKPGQA |
| | PRGLIGGTX₄X₅RAPX₇VPARFSGSLLGGKAALTX₁₁SGAQPEDE |
| | AEYYCALWYSNX₆WVFGGGTKLTVL |
| | X₄X₅ is SN or NK; |
| | X₆ is L or R; |
| | X₇ is G or W; and |
| | X₁₁ is I or L |
| 55 | QAVVTQEPSLTVSPGGIVTLICGSSTGAVTTGHYANWVQQKPGQA |
| | PRGLIGGTX₄X₅RAPGVPARFSGSLLGGKAALTISGAQPEDEAEY |
| | YCALWYSNRWVFGGGTKLTVL |
| | X₄X₅ is SN or NK |
| 56 | QAVVTQEPSLTVSPGGTVTLTCGSSTGAVTTGHYANWVQQKPGQA |
| VL13 | PRGLIGGTSNRAPGVPARFSGSLLGGKAALTISGAQPEDEAEYY |
| | CALWYSNRWVFGGGTKLTVL |
| 57 | QAVVTQEPSLTVSPGGTVTLTCGSSTGAVTTGHYANWVQQKPGQA |
| VL3 | PRGLIGGTNKRAPWTPARFSGSLLGGKAALTLSGAQPEDEAEYYC |
| | ALWYSNLWVFGGGTKLTVL |
| 58 | QAVVTQEPSLTVSPGGTVTLTCGSSTGAVTTGHYANWVQQKPGQA |
| VL8 | PRGLIGGTNKRAPGVPARFSGSLLGGKAALTISGAQPEDEAEYYC |
| | ALWYSNRWVFGGGTKLTVL |

[0103] “Homology” or “identity” or “similarity” as used herein in the context of nucleic acids and polypeptides refers to the relationship between two polypeptides or two nucleic acid molecules based on an alignment of the amino acid sequences or nucleic acid sequences, respectively. Homology and identity can each be determined by comparing a position in each sequence which may be aligned for purposes of comparison. When an equivalent position in the compared sequences is occupied by the same base or amino acid, then the molecules are identical at that position; when the equivalent site occupied by the same or a similar amino acid residue (e.g., similar in steric and/or electronic nature), then the molecules can be referred to as homologous (similar) at that position. Expression as a percentage of homology/similarity or identity refers to a function of the number of identical or similar amino acids at positions shared by the compared sequences. In comparing two sequences, the absence of residues (amino acids or nucleic acids) or presence of extra residues also decreases the identity and homology/similarity.

[0104] As used herein, “identity” means the percentage of identical nucleotide or amino acid residues at corresponding positions in two or more sequences when the sequences are aligned to maximize sequence matching, i.e., taking into account gaps and insertions. Sequences are generally aligned for maximum correspondence over a designated region, e.g., a region at least 20, 25, 30, 35, 40, 45, 50, 55, 60, 65 or more amino acids or nucleotides in length, and can be up to the full length of the reference polypeptide or polynucleotide sequence. For sequence comparison, typically one sequence acts as a reference sequence, to which test sequences are compared. When using a sequence comparison algorithm, test and reference sequences are input into a computer program, subsequence coordinates are designated, if necessary, and sequence algorithm program parameters are designated. Otherwise, standard parameters can be used. The sequence comparison algorithm then calculates the percent sequence identity for the test sequence(s) relative to the reference sequence, based on the designated program parameters.

[0105] When comparing polynucleotide and polypeptide sequences, two sequences are said to be “identical” if the sequence of nucleotides or amino acids in the two sequences is the same when aligned for maximum correspondence, as described below. Comparisons between two sequences are typically performed by comparing the sequences over a comparison window to identify and compare local regions of sequence similarity. A “comparison window” as used herein, refers to a segment of at least 20 contiguous positions, usually 30 to 75, 40 to 50, or the full length of a sequence, in which a sequence may be compared to a reference sequence of the same number of contiguous positions after the two sequences are optimally aligned.

[0106] Optimal alignment of sequences for comparison may be conducted by the local identity algorithm of Smith and Waterman (1981) Add. APL. Math 2:482, by the identity alignment algorithm of Needleman and Wunsch (1970) J. Mol. Biol. 48:443, by the search for similarity methods of Pearson and Lipman (1988) Proc. Natl. Acad. Sci. USA 85: 2444, by computerized implementations of these algorithms (e.g., GAP, BESTFIT, BLAST, FASTA, and TFASTA in the Wisconsin Genetics Software Package, Genetics Computer Group (GCG), 575 Science Dr., Madison, WI), or by inspection.

[0107] One example of algorithms that are suitable for determining percent sequence identity are the Basic Local Alignment Search Tool (BLAST), BLAST 2.0 and PSI-BLAST algorithms, which are described in Altschul, et al., J. Mol. Biol. (1990) 215: 403-410, Altschul, et al., Nucleic Acids Res. (1977) 25: 3389-3402, and Altschul, et al., Nucleic Acids Res. (1997) 25(17):3389-402, respectively. Software for performing BLAST analyses is publicly available through the National Center for Biotechnology Information (blast.ncbi.nlm.nih.gov/Blast.cgi).

[0108] In one illustrative example, cumulative scores can be calculated using, for nucleotide sequences, the parameters M (reward score for a pair of matching residues; always >0) and N (penalty score for mismatching residues; always <0). Extension of the word hits in each direction are halted when: the cumulative alignment score falls off by the quantity X from its maximum achieved value; the cumulative score goes to zero or below, due to the accumulation of one or more negative-scoring residue alignments; or the end of either sequence is reached. The BLAST algorithm parameters W, T and X determine the sensitivity and speed of the alignment. The BLASTN program (for nucleotide sequences) uses as defaults a word length (W) of 11, and expectation (E) of 10, and the BLOSUM62 scoring matrix (see Henikoff and Henikoff (1989) Proc. Natl. Acad. Sci. USA 89: 10915) alignments, (B) of 50, expectation (E) of 10, M=5, N=−4 and a comparison of both strands.

[0109] For amino acid sequences, a scoring matrix can be used to calculate the cumulative score. Extension of the word hits in each direction are halted when: the cumulative alignment score falls off by the quantity X from its maximum achieved value; the cumulative score goes to zero or below, due to the accumulation of one or more negative-scoring residue alignments; or the end of either sequence is reached. The BLASTP algorithm parameters W, T and X determine the sensitivity and speed of the alignment.

[0110] In one approach, the “percentage of sequence identity” is determined by comparing two optimally aligned sequences over a window of comparison of at least 20 positions, wherein the portion of the polynucleotide or polypeptide sequence in the comparison window may comprise additions or deletions (i.e., gaps) of 20 percent or less, usually 5 to 15 percent, or 10 to 12 percent, as compared to the reference sequences (which does not comprise additions or deletions) for optimal alignment of the two sequences. The percentage is calculated by determining the number of positions at which the identical nucleic acid bases or amino acid residues occur in both sequences to yield the number of matched positions, dividing the number of matched positions by the total number of positions in the reference sequence (i.e., the window size) and multiplying the results by 100 to yield the percentage of sequence identity.

[0111] Residue positions which are not identical can differ by conservative amino acid substitutions. Conservative amino acid substitutions refer to the interchangeability of residues having similar side chains. For example, a group of amino acids having aliphatic side chains is glycine (Gly, G), alanine (Ala, A), valine (Val, V), leucine (Leu, L), and isoleucine (Ile, I); a group of amino acids having aliphatic-hydroxyl side chains is serine (Ser, S) and threonine (Thr, T); a group of amino acids having amide-containing side chains is asparagine (Asn, N) and glutamine (Gln, Q); a group of amino acids having aromatic side chains is phenylalanine (Phe, F), tyrosine (Tyr, Y), and tryptophan (Trp, W); a group of amino acids having basic side chains is lysine (Lys, K), arginine (Arg, R), and histidine (His, H); and a group of amino acids having sulfur-containing side chains is cysteine (Cys, C) and methionine (Met, M). Further, glutamic acid (Glu, E) and aspartic acid (Asp, D) are conservative amino acid substitutions.

[0112] In various embodiments, one or both of the first antigen binding domain and the second antigen binding domain independently comprise a Fab, an F(ab)2, Fv, a scFv, a sc(Fv)2, or a diabody. In some embodiments, the first antigen binding domain comprises a scFv and the second antigen binding domain comprises a Fab. In some embodiments, the first antigen binding domain comprises a Fab and the second antigen binding domain comprises a scFv. In some embodiments, the first antigen binding domain comprises a Fab and the second antigen binding domain comprises a Fab. In some embodiments, the first antigen binding domain comprises a scFv and the second antigen binding domain comprises a scFv. In some embodiments, the first antigen binding domain comprises a Fab and the second antigen binding domain comprises one or more extracellular domains of CD4, e.g., as set forth herein. In some embodiments, the first antigen binding domain comprises a scFv and the second antigen binding domain comprises one or more extracellular domains of CD4, e.g., as set forth herein. Embodiments comprising an scFv can have one or both of the following amino acid substitutions (numbering according to Kabat): (i) a cysteine (C) at position 44 in the scFv variable heavy domain; and (ii) a cysteine (C) at position 100 in the scFv variable light domain.

[0113] In some embodiments, the first antigen binding domain is a scFv comprising a VH and a VL, the scFv comprises an amino acid sequence selected from SEQ ID NOs: 59-66, or that is at least 80%, at least 85%, at least 90%, at least 91%, at least 92%, at least 93%, at least 94%, at least 95%, at least 96%, at least 97%, at least 98%, or at least 99% identical to an amino acid sequence selected from SEQ ID NOs: 59-66. In some embodiments, the first antigen binding domain is a scFv comprising a VH and a VL, the scFv comprises an amino acid sequence selected from SEQ ID NOs: 59-63, or that is at least 80%, at least 85%, at least 90%, at least 91%, at least 92%, at least 93%, at least 94%, at least 95%, at least 96%, at least 97%, at least 98%, or at least 99% identical to an amino acid sequence selected from SEQ ID NOs: 59-63. In some embodiments, the first antigen binding domain is a scFv comprising a VH and a VL, the scFv comprising an amino acid sequence selected from SEQ ID NOs: 59-66, e.g., SEQ ID NOs: 59-63, e.g., SEQ ID NOs: 61, 62 or 63, e.g., SEQ ID NOs: 62 or 63. Illustrative sequences of scFv of the first antigen binding domains of the multi-specific antigen binding molecules, targeting human CD3, are provided in Table C.

TABLE C

| SEQ | |
|---|---|
| ID | |
| NO: | |
| Ab name | scFv for anti-CD3 binding arm |
| 59 | EVQLVESGGGLVQPGGSLRLSCAASGFTFNTYAMNWVRQAP |
| | GKGLEWVGRIRSKYNNYATYYAX₁SVKX₂RFTISRDDSKNSL |
| | YLX₈MNSLX₉TEDTAX₁₀YYCVRHGNFGX₃SYVSWFAYWGQGT |
| | LVTVSSGGGGSGGGGSGGGGSGGGGSQAVVTQEPSLTVSPG |
| | GTVTLTCGSSTGAVTTGHYANWVQQKPGQAPRGLIGGTX₄X₅ |
| | RAPX₇VPARFSGSLLGGKAALTX₁₁SGAQPEDEAEYYCALWY |
| | SNX₆WVFGGGTKLTVL |
| | X₁ is A or D; |
| | X₂ is G or S; |
| | X₃ is H or N; |
| | X₈ is E or Q; |
| | X₉ is K or R; |
| | X₁₀ is M or V; |
| | X₄X₅ is SN or NK; |
| | X₆ is L or R; |
| | X₇ is G or W; and |
| | X₁₁ is I or L |
| 60 | EVQLVESGGGLVQPGGSLRLSCAASGFTFNTYAMNWVRQ |
| | APGKGLEWVGRIRSKYNNYATYYADSVKX₂RFTISRDDS |
| | KNSLYLX₈ANSLRTEDTAVYYCVRHGNFGHSYVSWFAYW |
| | GQGTLVTVSSGGGGSGGGGSGGGGSGGGGSQAVVTQEPS |
| | LIVSPGGTVTLICGSSIGAVTIGHYANWVQQKPGQAPRG |
| | LIGGTX₄X₅RAPGVPARFSGSLLGGKAALTISGAQPEDE |
| | AEYYCALWYSNRWVFGGGTKLTVL |
| | X₂ is G or S; |
| | X₄X₅ is SN or NK; and |
| | X₈ is E or Q |
| 61 | EVQLVESGGGLVQPGGSLRLSCAASGFTFNTYAMNWVRQ |
| | APGKGLEWVGRIRSKYNNYATYYADSVKX₂RFTISRDDS |
| | KNSLYLX₈ANSLRTEDTAVYYCVRHGNFGHSYVSWFAYW |
| | GQGTLVTVSSGGGGSGGGGSGGGGSGGGGSQAVVTQEPS |
| | LTVSPGGTVTLICGSSTGAVTTGHYANWVQQKPGQAPRG |
| | LIGGTSNRAPGVPARFSGSLLGGKAALTISGAQPEDEAE |
| | YYCALWYSNRWVFGGGTKLTVL |
| | X₂ is G or S; and |
| | X₈ is E or Q |
| 62 | EVQLVESGGGLVQPGGSLRLSCAASGFTFNTYAMNWVRQ |
| 3.13 | APGKGLEWVGRIRSKYNNYATYYADSVKGRFTISRDDSK |
| | NSLYLQMNSLRTEDTAVYYCVRHGNFGHSYVSWFAYWGQ |
| | GTLVTVSSGGGGSGGGGSGGGGSGGGGSQAVVTQEPSLT |
| | VSPGGTVTLICGSSTGAVTTGHYANWVQQKPGQAPRGLI |
| | GGTSNRAPGVPARFSGSLLGGKAALTISGAQPEDEAEYY |
| | CALWYSNRWVFGGGTKLTVL |
| 63 | EVQLVESGGGLVQPGGSLRLSCAASGFTFNTYAMNWVRQ |
| 39.13 | APGKGLEWVGRIRSKYNNYATYYADSVKSRFTISRDDSK |
| | NSLYLEMNSLRTEDTAVYYCVRHGNFGHSYVSWFAYWGQ |
| | GTLVTVSSGGGGSGGGGSGGGGSGGGGSQAVVTQEPSLT |
| | VSPGGTVTLICGSSTGAVTTGHYANWVQQKPGQAPRGLI |
| | GGTSNRAPGVPARFSGSLLGGKAALTISGAQPEDEAEYY |
| | CALWYSNRWVFGGGTKLTVL |
| 64 | EVQLVESGGGLVQPGGSLRLSCAASGFTFNTYAMNWVRQ |
| 34.3 | APGKGLEWVGRIRSKYNNYATYYAASVKGRFTISRDDSK |
| | NSLYLQMNSLKTEDTAMYYCVRHGNFGHSYVSWFAYWGQ |
| | GTLVTVSSGGGGSGGGGSGGGGSGGGGSQAVVTQEPSLT |
| | VSPGGTVTLICGSSTGAVTTGHYANWVQQKPGQAPRGLI |
| | GGTNKRAPWTPARFSGSLLGGKAALTLSGAQPEDEAEYY |
| | CALWYSNLWVFGGGTKLTVL |
| 65 | EVQLVESGGGLVQPGGSLRLSCAASGFTFNTYAMNWVRQ |
| 1.3 | APGKGLEWVGRIRSKYNNYATYYAASVKGRFTISRDDSK |
| | NSLYLQMNSLKTEDTAMYYCVRHGNFGNSYVSWFAYWGQ |
| | GTLVTVSSGGGGSGGGGSGGGGSGGGGSQAVVTQEPSLT |
| | VSPGGTVTLTCGSSTGAVTTGHYANWVQQKPGQAPRGLI |
| | GGTNKRAPWTPARFSGSLLGGKAALTLSGAQPEDEAEYY |
| | CALWYSNLWVFGGGTKLTVL |
| 66 | EVQLVESGGGLVQPGGSLRLSCAASGFTFNTYAMNWVRQ |
| 3.8 | APGKGLEWVGRIRSKYNNYATYYADSVKGRFTISRDDSK |
| | NSLYLQMNSLRTEDTAVYYCVRHGNFGHSYVSWFAYWGQ |
| | GTLVTVSSGGGGSGGGGSGGGGSGGGGSQAVVTQEPSLT |
| | VSPGGTVTLTCGSSTGAVTTGHYANWVQQKPGQAPRGLI |
| | GGTNKRAPGVPARFSGSLLGGKAALTISGAQPEDEAEYY |
| | CALWYSNRWVFGGGTKLTVL |

[0114] In some embodiments, the first antigen binding domain, e.g., in scFv or Fab format, binds to CD3 with a K_{D} of lower than 10 nM, e.g., lower than 9.5 nM, 9.0 nM, 8.5 nM, 8.0 nM, 7.5 nM, 7.0 nM, 6.5 nM, 6.0 nM, 5.5 nM, 5.0 nM, 4.5 nM, 4.0 nM, 3.5 nM, 3.0 nM, or lower. In some embodiments, the first antigen binding domain binds to CD3 with a K_{D} of lower than 10 nM, e.g., lower than 5.0 nM, 4.5 nM, 4.0 nM, 3.5 nM, 3.0 nM, or lower. Protein binding affinity can be determined by any method known in the art, e.g., by surface plasmon resonance (SPR), e.g., using Octet as described herein.

### 3. Anti-HIV Antigen Arm

[0115] HIV-1 is the main family of HIV and accounts for 95% of all infections worldwide. HIV-2 is mainly seen in a few West African countries.

[0116] HIV viruses are divided into specific groups, M, N, O and P, of which M is the “major” group and responsible for majority of HIV/AIDS globally. Based on their genetic sequence, Group M is further subdivided into subtypes (also called clades) with prevalence in distinct geographical locations.

[0117] A Group M “subtype” or “clade” is a subtype of HIV-1 group M defined by genetic sequence data. Examples of Group M subtypes include Subtypes A-K. Some of the subtypes are known to be more virulent or are resistant to different medications. There are also “circulating recombinant forms” or CRFs derived from recombination between viruses of different subtypes, which are each given a number. CRF12_BF, for example, is a recombination between subtypes B and F. Subtype A is common in West Africa. Subtype B is the dominant form in Europe, the Americas, Japan, Thailand, and Australia. Subtype C is the dominant form in Southern Africa, Eastern Africa, India, Nepal, and parts of China. Subtype D is generally only seen in Eastern and central Africa. Subtype E has never been identified as a nonrecombinant, only recombined with subtype A as CRF01_AE. Subtype F has been found in central Africa, South America and Eastern Europe. Subtype G (and the CRF02_AG) have been found in Africa and central Europe. Subtype H is limited to central Africa. Subtype I was originally used to describe a strain that is now accounted for as CRF04_cpx, with the cpx for a “complex” recombination of several subtypes. Subtype J is primarily found in North, Central and West Africa, and the Caribbean Subtype K is limited to the Democratic Republic of Congo and Cameroon. These subtypes are sometimes further split into sub-subtypes such as A1 and A2 or F1 and F2. In 2015, the strain CRF19, a recombinant of subtype A, subtype D, and subtype G, with a subtype D protease was found to be strongly associated with rapid progression to AIDS in Cuba.

[0118] This disclosure provides, inter alia, multi-specific antigen binding molecules comprising second antigen binding domains derived from human anti-HIV neutralizing antibodies (e.g., broadly neutralizing Abs) that target the gp120 polypeptide on the surface of HIV-infected cells. Neutralizing antibodies against viral envelope proteins provide adaptive immune defense against HIV-1 exposure by blocking the infection of susceptible cells. Broad neutralization indicates that the antibodies can neutralize HIV-1 isolates from different clades. Thus, the multi-specific antigen binding molecules described herein have cross-clade binding activity.

gp120

[0119] Envelope glycoprotein gp120 (or gp120) is a 120 kDa glycoprotein that is part of the outer layer of HIV. It presents itself as viral membrane spikes consisting of three molecules of gp120 linked together and anchored to the membrane by gp41 protein. Gp120 is essential for viral infection as it facilitates HIV entry into the host cell through its interaction with cell surface receptors. These receptors include DC-SIGN, Heparan Sulfate Proteoglycan, and the CD4 receptor. Binding to CD4 on helper T-cells induces the start of a cascade of conformational changes in gp120 and gp41 that lead to the fusion of the virus with the host cell membrane.

[0120] Gp120 is encoded by the HIV env gene. The env gene encodes a gene product of around 850 amino acids. The primary env product is the protein gp160, which gets cleaved to gp120 (about 480 amino acids) and gp41 (about 345 amino acids) in the endoplasmic reticulum by the cellular protease furin.

[0121] The amino acid sequence of an exemplary gp160 polypeptide of HIV clone WITO is provided below (the V3 hypervariable loop is boldened and the N332 potential N-linked glycosylation site is boldened and underlined):

(SEQ ID NO: 67)
MKVMGTKKNYQHLWRWGIMLLGMLMMSSAAEQLWVTVYYGVPVWREANTT
LFCASDAKAYDTEVHNVWATHACVPTDPNPQEVVMGNVTEDFNMWKNNMV
EQMHEDIISLWDQSLKPCVKLTPLCVTLHCTNVTISSTNGSTANVTMREE
MKNCSFNTTTVIRDKIQKEYALFYKLDIVPIEGKNTNTSYRLINCNTSVI
TQACPKVSFEPIPIHYCAPAGFAILKCNNKTFNGKGPCRNVSTVQCTHGI
KPVVSTQLLLNGSLAEEDIIIRSENFTNNGKNIIVQLKEPVKINCTRPGN
NTRRSINIGPGRAFYATGAIIGDIRKAHCNISTEQWNNTLTQIVDKLREQ
FGNKTIIFNQSSGGDPEVVMHTFNCGGEFFYCNSTQLFNSTWFNNGTSTW
NSTADNITLPCRIKQVINMWQEVGKAMYAPPIRGQIDCSSNITGLILTRD
GGSNSSQNETFRPGGGNMKDNWRSELYKYKVVKIEPLGIAPTRAKRRVVQ
REKRAVTLGAVFLGFLGAAGSTMGAASLTLTVQARLLLSGIVQQQSNLLR
AIEAQQHMLQLTVWGIKQLQARVLAIERYLKDQQLLGIWGCSGKLICTTT
VPWNTSWSNKSYDYIWNNMTWMQWEREIDNYTGFIYTLIEESQNQQEKNE
LELLELDKWASLWNWFNITNWLWYIKLFIMIIGGLVGLRIVCAVLSIVNR
VRQGYSPLSFQTRLPNPRGPDRPEETEGEGGERDRDRSARLVNGFLAIIW
DDLRSLCLFSYHRLRDLLLIVARVVEILGRRGWEILKYWWNLLKYWSQEL
KNSAVSLLNVTAIAVAEGTDRVIEIVQRAVRAILHIPTRIRQGFERALL

[0122] The amino acid sequence of an exemplary gp160 polypeptide of HIV clone identified in NCBI Ref Seq No. NP_057856.1 is provided below (the V3 hypervariable loop is boldened and the N332 potential N-linked glycosylation site is boldened and underlined):

(SEQ ID NO: 68)
MRVKEKYQHLWRWGWRWGTMLLGMLMICSATEKLWVTVYYGVPVWKEATT
TLFCASDAKAYDTEVHNVWATHACVPTDPNPQEVVLVNVTENFNMWKNDM
VEQMHEDIISLWDQSLKPCVKLTPLCVSLKCTDLKNDTNTNSSSGRMIME
KGEIKNCSFNISTSIRGKVQKEYAFFYKLDIIPIDNDTTSYKLTSCNTSV
ITQACPKVSFEPIPIHYCAPAGFAILKCNNKTFNGTGPCTNVSTVQCTHG
IRPVVSTQLLLNGSLAEEEVVIRSVNFTDNAKTIIVQLNTSVEINCTRPN
NNTRKRIRIQRGPGRAFVTIGKIGNMRQAHCNISRAKWNNTLKQIASKLR
EQFGNNKTIIFKQSSGGDPEIVTHSFNCGGEFFYCNSTQLFNSTWFNSTW
STEGSNNTEGSDTITLPCRIKQIINMWQKVGKAMYAPPISGQIRCSSNIT
GLLLTRDGGNSNNESEIFRPGGGDMRDNWRSELYKYKVVKIEPLGVAPTK
AKRRVVQREKRAVGIGALFLGFLGAAGSTMGAASMTLTVQARQLLSGIVQ
QQNNLLRAIEAQQHLLQLTVWGIKQLQARILAVERYLKDQQLLGIWGCSG
KLICTTAVPWNASWSNKSLEQIWNHTTWMEWDREINNYTSLIHSLIEESQ
NQQEKNEQELLELDKWASLWNWFNITNWLWYIKLFIMIVGGLVGLRIVFA
VLSIVNRVRQGYSPLSFQTHLPTPRGPDRPEGIEEEGGERDRDRSIRLVN
GSLALIWDDLRSLCLFSYHRLRDLLLIVTRIVELLGRRGWEALKYWWNLL
QYWSQELKNSAVSLLNATAIAVAEGTDRVIEVVQGACRAIRHIPRRIRQG
LERILL

[0123] The amino acid sequence of an exemplary gp120 polypeptide of HXB2 subtype B HIV-1 isolate (GenBank Accession No. K0345; corresponding to residues 1-511 of NCBI Ref Seq No. NP_057856.1) is provided below (the V3 hypervariable loop is boldened and the N332 potential N-linked glycosylation site is boldened and underlined; signal peptide is underlined):

(SEQ ID NO: 69)
MRVKEKYQHLWRWGWRWGTMLLGMLMICSATEKLWVTVYYGVPVWKEATT
TLFCASDAKAYDTEVHNVWATHACVPTDPNPQEVVLVNVTENFNMWKNDM
VEQMHEDIISLWDQSLKPCVKLTPLCVSLKCTDLKNDTNTNSSSGRMIME
KGEIKNCSFNISTSIRGKVQKEYAFFYKLDIIPIDNDTTSYKLTSCNTSV
ITQACPKVSFEPIPIHYCAPAGFAILKCNNKTFNGTGPCTNVSTVQCTHG
IRPVVSTQLLLNGSLAEEEVVIRSVNFTDNAKTIIVQLNTSVEINCTRPN
NNTRKRIRIQRGPGRAFVTIGKIGNMRQAHCNISRAKWNNTLKQIASKLR
EQFGNNKTIIFKQSSGGDPEIVTHSFNCGGEFFYCNSTQLFNSTWFNSTW
STEGSNNTEGSDTITLPCRIKQIINMWQKVGKAMYAPPISGQIRCSSNIT
GLLLTRDGGNSNNESEIFRPGGGDMRDNWRSELYKYKVVKIEPLGVAPTK
AKRRVVQREKR

[0124] The amino acid sequence of an exemplary gp120 polypeptide is provided below:

(SEQ ID NO: 70)
AEQLWVIVYYGVPVWREANTTLFCASDAKAYDTEVHNVWATHACVPTDPN
PQEVVMGNVTEDFNMWKNNMVEQMHEDIISLWDQSLKPCVKLTPLCVTLH
CTNVTISSTNGSTANVTMREEMKNCSFNTTTVIRDKIQKEYALFYKLDIV
PIEGKNTNTSYRLINCNTSVITQACPKVSFEPIPIHYCAPAGFAILKCNN
KTFNGKGPCRNVSTVQCTHGIKPVVSTQLLLNGSLAEEDIIIRSENFTNN
GKNIIVQLKEPVKINCTRPGNNTRRSINIGPGRAFYATGAIIGDIRKAHC
NISTEQWNNTLTQIVDKLREQFGNKTIIFNQSSGGDPEVVMHTFNCGGEF
FYCNSTQLFNSTWFNNGTSTWNSTADNITLPCRIKQVINMWQEVGKAMYA
PPIRGQIDCSSNITGLILTRDGGSNSSQNETFRPGGGNMKDNWRSELYKY
KVVKIEPLGIAPTRAKRRVVQREKR.

[0125] The amino acid sequence of another exemplary gp120 polypeptide (see, bioafrica.net/proteomics/ENV-GP120prot.html) is provided below:

(SEQ ID NO: 71)
TEKLWVTVYY GVPVWKEATT TLFCASDAKA YDTEVHNVWA
THACVPTDPN PQEVVLVNVT ENFNMWKNDM VEQMHEDIIS
LWDQSLKPCV KLTPLCVSLK CTDLKNDTNT NSSSGRMIME
KGEIKNCSFN ISTSIRGKVQ KEYAFFYKLD IIPIDNDTTS
YKLTSCNTSV ITQACPKVSF EPIPIHYCAP AGFAILKCNN
KTFNGTGPCT NVSTVQCTHG IRPVVSTQLL LNGSLAEEEV
VIRSVNFTDN AKTIIVQLNT SVEINCTRPN NNTRKRIRIQ
RGPGRAFVTI GKIGNMRQAH CNISRAKWNN TLKQIASKLR
EQFGNNKTII FKQSSGGDPE IVTHSFNCGG EFFYCNSTQL
FNSTWFNSTW STEGSNNTEG SDTITLPCRI KQIINMWQKV
GKAMYAPPIS GQIRCSSNIT GLLLTRDGGN SNNESEIFRP
GGGDMRDNWR SELYKYKVVK IEPLGVAPTK AKRRVVQREK R

[0126] Genomic diversity among independent human immunodeficiency virus type 1 (HIV-1) isolates, to a lesser degree among sequential isolates from the same patients, and even within a single patient isolate is a well-known feature of HIV-1. Although this sequence heterogeneity is distributed throughout the genome, most of the heterogeneity is located in the env gene. Comparison of predicted amino acid sequences from several different isolates has shown that sequence heterogeneity is clustered in five variable regions (designated V1 through V5) of the surface glycoprotein, gp120. The V3 region, although only 35 amino acids long, exhibits considerable sequence variability. Interestingly, in spite of this variability, the V3 region includes determinants that mediate interactions with CD4⁺ cells. The increase in gp120 variability results in higher levels of viral replication, suggesting an increase in viral fitness in individuals infected by diverse HIV-1 variants. Variability in potential N-linked glycosylation sites (PNGSs) also result in increased viral fitness. PNGSs allow for the binding of long-chain carbohydrates to the high variable regions of gp120. Thus, the number of PNGSs in env might affect the fitness of the virus by providing more or less sensitivity to neutralizing antibodies.

[0127] A consensus sequence of the V3 region of gp120 (Milich et al., J Virol., (1993) 67(9):5623-5634) is provided below:

(SEQ ID NO: 72)
CTRPNNNTRKSIHIGPGRAFYTTGEIIGDIRQAHC.

### Anti-Gp120 and Anti-Gp41 Antigen Binding Domains

[0128] This disclosure features anti-gp120 or anti-gp41 multi-specific antigen binding molecules comprising a second antigen binding domain that targets and binds to gp120 or gp41, respectively. In certain embodiments, these multi-specific antigen binding molecules bind to HIV-1 antigens expressed on a cell surface and eliminate or kill the infected cell.

[0129] In certain embodiments, the second antigen binding domains in the herein described multi-specific antigen binding molecules are derived from human neutralizing antibodies (e.g., monoclonal) that target HIV-1. A “neutralizing antibody” is one that can neutralize the ability of HIV to at least one of initiate and perpetuate an infection in at least one of a host in vivo and in target cells in vitro. The disclosure provides neutralizing monoclonal human antibodies, wherein the antibody recognizes an antigen from HIV, e.g., a gp120 polypeptide. In certain embodiments, a “neutralizing antibody” may inhibit the entry of HIV-1 virus, e.g., SF162 and/or JR-CSF, with a neutralization index >1.5 or >2.0 (Kostrikis L G et al., J. Virol., 70(1): 445-458 (1996)).

[0130] In some embodiments, the second antigen binding domains in the herein described multi-specific antigen binding molecules are derived from human broadly neutralizing antibodies (e.g., monoclonal) that target HIV-1. By “broadly neutralizing antibodies” are meant antibodies that neutralize more than one HIV-1 virus species (from diverse clades and different strains within a clade) in a neutralization assay. A broad neutralizing antibody may neutralize at least 2, 3, 4, 5, 6, 7, 8, 9 or more different strains of HIV-1, the strains belonging to the same or different clades. In particular embodiments, a broad neutralizing antibody may neutralize multiple HIV-1 species belonging to at least 2, 3, 4, 5, or 6 different clades. In certain embodiments, the inhibitory concentration of the multi-specific antigen binding molecule may be less than 0.0001 μg/ml, less than 0.001 g/ml, less than 0.01 μg/ml, less than 0.1 μg/ml, less than 0.5 μg/ml, less than 1.0 μg/ml, less than 5 μg/ml, less than 10 μg/ml, less than 25 μg/ml, less than 50 μg/ml, or less than 100 μg/ml to neutralize 50% of the input virus in the neutralization assay.

[0131] In some embodiments, the second antigen binding domain of the multi-specific antigen binding molecules binds to an epitope or region of gp120 selected from the group consisting of: (i) third variable loop (V3) (e.g., high mannose patch) comprising a N332 oligomannose glycan; (ii) second variable loop (V2) (e.g., Env trimer apex); (iii) CD4 binding site (CD4bs); (iv) gp120/gp41 interface; or (v) silent face of gp120. The foregoing epitopes or regions of gp120 bound by broadly neutralizing antibodies are described, e.g., in McCoy, Retrovirology (2018) 15:70; Sok and Burton, Nat Immunol. 2018 19(11):1179-1188; Possas, et al., Expert Opin Ther Pat. 2018 July; 28(7):551-560; and Stephenson and Barouch, Curr HIV/AIDS Rep (2016) 13:31-37, which are hereby incorporated herein by reference in their entirety for all purposes.

[0132] In some embodiments, the second antigen binding domain binds to an epitope or region of gp120 in the third variable loop (V3) (e.g., high mannose patch) comprising a N332 oligomannose glycan and competes with or comprises VH and VL regions from an antibody selected from the group consisting of GS-9722 (elipovimab), GS-2872, PGT-121, PGT-121.66, PGT-121.414, PGT-122, PGT-123, PGT-124, PGT-125, PGT-126, PGT-128, PGT-130, PGT-133, PGT-134, PGT-135, PGT-136, PGT-137, PGT-138, PGT-139, 10-1074, 10-1074-J, VRC24, 2G12, BG18, 354BG8, 354BG18, 354BG42, 354BG33, 354BG129, 354BG188, 354BG411, 354BG426, DH270.1, DH270.6, PGDM12, VRC41.01, PGDM21, PCDN-33A, BF520.1 and VRC29.03. Additional broadly neutralizing antibodies that bind to gp120 in the third variable loop (V3) (e.g., high mannose patch) comprising a N332 oligomannose glycan and which can be used in the second antigen binding domain of the herein described multi-specific antigen binding molecules are described, e.g., in WO 2012/030904; WO 2014/063059; WO 2016/149698; WO 2017/106346; WO 2018/075564, WO 2018/125813; WO 2018/237148, WO 2019/226829, WO 2020/023827, WO2020/056145 and Kerwin, et al., J Pharm Sci. 2020 January; 109(1):233-246, which are hereby incorporated herein by reference in their entireties for all purposes.

[0133] In some embodiments, the second antigen binding domain binds to an epitope or region of gp120 in the second variable loop (V2) (e.g., Env trimer apex) and competes with or comprises VH and VL regions from an antibody selected from the group consisting of PG9, PG16, PGC14, PGG14, PGT-142, PGT-143, PGT-144, PGT-145, CH01, CH59, PGDM1400, CAP256, CAP256-VRC26.08, CAP256-VRC26.09, CAP256-VRC26.25, PCT64-24E and VRC38.01. Additional broadly neutralizing antibodies that bind to gp120 in the second variable loop (V2) (e.g., Env trimer apex) and which can be used in the second antigen binding domain of the herein described multi-specific antigen binding molecules are described, e.g., in WO 2010/107939; WO 2012/030904; WO 2018/075564 and WO 2018/125813, which are hereby incorporated herein by reference in their entireties for all purposes.

gp120 CD4 Binding Site

[0134] Antibody variants described herein bind to the CD4 binding site (CD4bs) of HIV gp120. The CD4 binding site (CD4bs) involves structurally conserved sites located within the β1-α1, loop D, β20-β21 (bridging sheet) and β24-α5 of gp120, which determine the CD4 binding and are involved in the epitopes of CD4bs-directed antibodies (Qiao, et al., Antiviral Res. 2016 August; 132:252-61). The CD4bs of gp120 forms conformational epitopes recognized by anti-CD4bs antibodies involving one or more amino acid residues selected from Thr278, Asp279, Ala281, Thr283, Asp368, Trp427, Glu460, Ser461, Glu462, Leu452, Leu453 and Arg476. The amino acid residues and position numbering is with reference to HXB2 subtype B HIV-1 isolate, which corresponds to residues 1-511 of NCBI Ref Seq No. NP_057856.1, provided below. Residues Thr278, Asp279, Asn280, Ala281, Thr283, Asp368, Trp427, Leu452, Leu453, Gly459, Glu464, Ser465, Glu466, Ile467, Gly472, Gly473 and Arg476, which can contribute to the gp120 CD4bs, are boldened and underlined:

(SEQ ID NO: 73)
MRVKEKYQHLWRWGWRWGTMLLGMLMICSATEKLWVTVYYGVPVWKEATT
TLFCASDAKAYDTEVHNVWATHACVPTDPNPQEVVLVNVTENFNMWKNDM
VEQMHEDIISLWDQSLKPCVKLTPLCVSLKCTDLKNDTNTNSSSGRMIME
KGEIKNCSFNISTSIRGKVQKEYAFFYKLDIIPIDNDTTSYKLTSCNTSV
ITQACPKVSFEPIPIHYCAPAGFAILKCNNKTFNGTGPCTNVSTVQCTHG
IRPVVSTQLLLNGSLAEEEVVIRSVNFTDNAKTIIVQLNTSVEINCTRPN
NNTRKRIRIQRGPGRAFVTIGKIGNMRQAHCNISRAKWNNTLKQIASKLR
EQFGNNKTIIFKQSSGGDPEIVTHSFNCGGEFFYCNSTQLFNSTWFNSTW
STEGSNNTEGSDTITLPCRIKQIINMWQKVGKAMYAPPISGQIRCSSNIT
GLLLTRDGGNSNNESEIFRPGGGDMRDNWRSELYKYKVVKIEPLGVAPTK
AKRRVVQREKR.

[0135] Tridimensional models depicting amino acid residues contributing to the gp120 CD4bs are provided, e.g., in Canducci, et al., Retrovirology. 2009 Jan. 15; 6:4; Falkowska, et al., J Virol. 2012 April; 86(8):4394-403; and Li, et al., J. Virol. 2012 October; 86(20):11231-41; Gristick, et al., Nat Struct Mol Biol. 2016 October; 23(10):906-915; Kwon, et al., Nat Struct Mol Biol. 2015 July; 22(7):522-31; Liu, et al., Nat Struct Mol Biol. 2017 April; 24(4):370-378; Chen, et al., Science. 2009 Nov. 20; 326(5956):1123-7 and Lyumkis, et al., Science. 2013 Dec. 20; 342(6165):1484-90. In some embodiments, the second antigen binding domain binds to an epitope or region of gp120 in the CD4 binding site (CD4bs) and competes with or comprises VH and VL regions from an antibody selected from the group consisting of 3BNC117, GS-9723, GS-5423, 3BNC60, b12, CH103, 1NC9, 12A12, VRC01, VRC07, VRC07-523, N6, NIH45-46 and PGV04 (a.k.a., VRC-PG04) for binding to gp120 CD4bs. In some embodiments, the antibody variants described herein bind to an overlapping or identical epitope to the epitope bound by one or more of anti-CD4bs antibodies 3BNC117, GS-9723, GS-5423, 3BNC60, b12, CH103, 1NC9, 12A12, VRC01, VRC07, VRC07-523, N6, NIH45-46 and PGV04 (a.k.a., VRC-PG04).

[0136] In some embodiments, the second antigen binding domain binds to an epitope or region of gp120 in the CD4 binding site (CD4bs) and comprises immunoglobulin VH and VL (e.g., in Fab or scFv format) that compete with or comprise VH and VL regions from an antibody selected from the group consisting of b12, F105, VRC01, VRC07, VRC07-523, VRC03, VRC06, VRC06b01 VRC08, VRC0801, NIH45-46, 3BNC117, GS-9723, GS-5423, 3BNC60, PGV04 (a.k.a., VRC-PG04); CH103, 44-VRC13.01, 1NC9, 12A12, N6, 1-18, N49-P7, NC-Cow1, IOMA, CH235 and CH235.12, N49P6, N49P7, N49P11, N49P9 and N60P25. Additional broadly neutralizing antibodies that bind to gp120 in the CD4 binding site (CD4bs) and which can be used in the second antigen binding domain of the herein described multi-specific antigen binding molecules are described, e.g., in WO 2011/038290; WO 2012/158948; WO 2013/016468; WO 2013/192589; WO 2013/086533; WO 2015/128846; WO 2016/149698; WO 2016/149695; WO 2018/075564; WO 2018/125813; WO 2018/237357, WO 2020/010107, WO 2020/086446 and U.S. Pat. Nos. 9,493,549 and 9,879,068, which are hereby incorporated herein by reference in their entireties for all purposes.

[0137] In some embodiments, the second antigen binding domain binds to an epitope or region of gp120 in the CD4 binding site (CD4bs) and competes with or comprises VH and VL regions from 3BNC117 and comprises Phe-Asp-Phe-Asp (FDFD) (SEQ ID NO: 1040) at positions 74a, 74b, 74c, and 74d of the VH (position numbering according to Kabat). In some embodiments, the second antigen binding domain binds to an epitope or region of gp120 in the CD4 binding site (CD4bs) and competes with or comprises VH and VL regions from 3BNC117 and comprises a framework region 3 (FR3) of the VH comprising the following amino acid sequence RVSLTRHASFDFDTFSFYMDLKALRSDDTAVYFCAR (SEQ ID NO: 74). Crystallographic studies have shown that framework region 3 at VH Kabat position numbers 74a, 74b, 74c and 74d form part of the paratope of 3BNC117 variants, directly contacting the antigen target, gp120. See, e.g., Lee, et al., Immunity (2017) 46(4): 690-702 (FIG. 1G, identifying residue W71d); Klein, et al., Cell. (2013) 153(1):126-38 (FIGS. 4 and 5); and Zhou, et al., (2013) Immunity (2013) 39 245-258 (Table 1); ribbon diagrams of crystallized structures of 5V8L, 5V8M, 4JPV and 4LSV can be viewed at resb.org. In some embodiments, at least 50%, at least 60%, at least 70%, least 80%, at least 85%, at least 90%, or more, N-linked glycosylation sites in at least one of the first VH, the first VL, the second VH and the second VL are sialylated. In some embodiments, the N-linked glycosylation sites in at least one of the first VH, the first VL, the second VH and the second VL have a sialic acid occupancy (e.g., a glycan comprising one or two terminal sialic acid residues) of at least 40%, at least 50%, at least 60%, at least 70%, least 80%, at least 85%, at least 90%, or more. In some embodiments, the N-linked glycosylation site at VL asparagine amino acid position 72 (N72) according to Kabat numbering is sialylated. In some embodiments, the sialylated N-linked glycosylation sites in at least one of the first VH, the first VL, the second VH and the second VL comprise from 1 to 5 sialic acid residues, e.g., from 1 to 4 sialic acid residues, e.g., from 1 to 3 sialic acid residues, e.g., from 1 to 2 sialic acid residues. In some embodiments, at least one of the first VH, the first VL, the second VH and the second VL are sialylated with N-acetylneuraminic acid (NANA). In some embodiments, the sialic acid residues are present in biantennary structures. In some embodiments, the sialic acid residues are present in complex N-linked glycan structures. In some embodiments, the sialic acid residues are present in hybrid N-linked glycan structures.

[0138] In some embodiments, the second antigen binding domain binds to an epitope or region of gp120 in the CD4 binding site (CD4bs) and comprises an EC domain of CD4 (e.g., domain 1 (D1), D1-D1 (tandem), D1-D2, D1-D2-D3-D3, or D1-D2-D3-D4). Illustrative CD4 extracellular domains that can be used in the herein described multi-specific antigen binding molecules are described, e.g., in WO2011146891, WO2014150748 and WO2016153572. In some embodiments, the one or more EC domains of CD4 comprises an amino acid sequence that is at least 80%, at least 85%, at least 90%, at least 91%, at least 92%, at least 93%, at least 94%, at least 95%, at least 96%, at least 97%, at least 98%, at least 99% identical, or 100% identical, to a CD4 EC domain selected from:

(i)
KKVVYGKKGDTVELTCTASQKKNIQFHWKNSNQIKILGNQGSFLTKGPSK
LNDRVDSRRSLWDQGNFPLIIKNLKPEDSDTYICEVEDQKEEVQLVVVG
(SEQ ID NO: 746; see, e.g., Chen, et al., J Virol.
2014 January; 88(2):1125-39);
(ii)
(SEQ ID NO: 747)
KKVVYGKKGDTVELTCTASQKKNIQFHWKNSNQIKILGNQGSFLTKGPSK
LNDRVDSRRSLWDQGNFPLIIKNLKPEDSDTYICEVEDQKEEVQLVVVGG
GGSGKKVVYGKKGDTVELTCTASQKKNIQFHWKNSNQIKILGNQGSFLTK
GPSKLNDRVDSRRSLWDQGNFPLIIKNLKPEDSDTYICEVEDQKEEVQLV
VVG;
(iii)
(SEQ ID NO: 748)
KKVVLGKKGDTVELTCTASQKKSIQFHWKNSNQIKILGNQGSFLTKGPSK
LNDRADSRRSLWDQGNFPLIIKNLKIEDSDTYICEVEDQKEEVQLLVFG;
or
(iv)
(SEQ ID NO: 749)
KKVVLGKKGDTVELTCTASQKKSIQFHWKNSNQIKILGNQGSFLTKGPSK
LNDRADSRRSLWDQGNFPLIIKNLKIEDSDTYICEVEDQKEEVQLLVFGG
GGSGKKVVLGKKGDTVELTCTASQKKSIQFHWKNSNQIKILGNQGSFLTK
GPSKLNDRADSRRSLWDQGNFPLIIKNLKIEDSDTYICEVEDQKEEVQLL
VFG.

[0139] In some embodiments, the EC domain of CD4 comprises a sequence that is at least 80%, at least 85%, at least 90%, at least 91%, at least 92%, at least 93%, at least 94%, at least 95%, at least 96%, at least 97%, at least 98%, or at least 99% identical to the sequence of SEQ ID NO: 746. In some embodiments, the EC domain of CD4 comprises a sequence that is at least 95% identical to the sequence of SEQ ID NO: 746. In some embodiments, the EC domain of CD4 comprises a sequence that is at least 99% identical to the sequence of SEQ ID NO: 746. In some embodiments, the EC domain of CD4 comprises the sequence of SEQ ID NO: 746. In some embodiments, provided is a multi-specific antigen binding molecule comprising a first antigen binding domain that binds to human CD3 and a second antigen binding domain that binds to HIV gp120, wherein the first antigen binding domain comprises a first VH-CDR1, a first VH-CDR2, a first VH-CDR3, a first VL-CDR1, a first VL-CDR2 and a first VL-CDR3 comprising the following amino acid sequences, respectively (according to Kabat): SEQ ID NOs: 1, 11, 8, 4, 9 and 10; or SEQ ID NOs: 1, 12, 8, 4, 9 and 10; and the second antigen binding domain comprises one or more EC domains of CD4 comprising an amino acid sequence that comprises or is at least 80%, at least 85%, at least 90%, at least 91%, at least 92%, at least 93%, at least 94%, at least 95%, at least 96%, at least 97%, at least 98%, or at least 99%, identical to a CD4 EC domain selected from the group consisting of SEQ ID NOs: 746-749, e.g., SEQ ID NO: 746.

[0140] In some embodiments, the first antigen binding domain comprises a first VH-CDR1, a first VH-CDR2, a first VH-CDR3, a first VL-CDR1, a first VL-CDR2 and a first VL-CDR3 comprising the following amino acid sequences, respectively (according to Kabat): SEQ ID NOs: 1, 12, 8, 4, 9 and 10; and the second antigen binding domain comprises one EC domain of CD4 comprising an amino acid sequence that is at least 80%, at least 85%, at least 90%, at least 91%, at least 92%, at least 93%, at least 94%, at least 95%, at least 96%, at least 97%, at least 98%, or at least 99%, identical to a CD4 EC domain of SEQ ID NO: 746. In some embodiments, the first antigen binding domain comprises a first VH-CDR1, a first VH-CDR2, a first VH-CDR3, a first VL-CDR1, a first VL-CDR2 and a first VL-CDR3 comprising the following amino acid sequences, respectively (according to Kabat): SEQ ID NOs: 1, 12, 8, 4, 9 and 10; and the second antigen binding domain comprises one EC domain of CD4 comprising an amino acid sequence that is at least 95% identical to a CD4 EC domain of SEQ ID NO: 746. In some embodiments, the first antigen binding domain comprises a first VH-CDR1, a first VH-CDR2, a first VH-CDR3, a first VL-CDR1, a first VL-CDR2 and a first VL-CDR3 comprising the following amino acid sequences, respectively (according to Kabat): SEQ ID NOs: 1, 12, 8, 4, 9 and 10; and the second antigen binding domain comprises one EC domain of CD4 comprising an amino acid sequence that is at least 99% identical to a CD4 EC domain of SEQ ID NO: 746. In some embodiments, the first antigen binding domain comprises a first VH-CDR1, a first VH-CDR2, a first VH-CDR3, a first VL-CDR1, a first VL-CDR2 and a first VL-CDR3 comprising the following amino acid sequences, respectively (according to Kabat): SEQ ID NOs: 1, 12, 8, 4, 9 and 10; and the second antigen binding domain comprises one EC domain of CD4 comprising the amino acid sequence of SEQ ID NO: 746.

[0141] In some embodiments, provided is a multi-specific antigen binding molecule comprising a first antigen binding domain that binds to human CD3 and a second antigen binding domain that binds to HIV gp120, wherein the first antigen binding domain comprises a first VH-CDR1, a first VH-CDR2, a first VH-CDR3, a first VL-CDR1, a first VL-CDR2 and a first VL-CDR3 comprising the following amino acid sequences, respectively (according to Chothia): SEQ ID NOs: 17, 18, 23, 20, 24 and 25; and the second antigen binding domain comprises one or more EC domains of CD4 comprising an amino acid sequence that comprises or is at least 80%, at least 85%, at least 90%, at least 91%, at least 92%, at least 93%, at least 94%, at least 95%, at least 96%, at least 97%, at least 98%, or at least 99%, identical to a CD4 EC domain selected from the group consisting of SEQ ID NOs: 746-749, e.g., SEQ ID NO: 746.

[0142] In some embodiments, the first antigen binding domain comprises a first VH-CDR1, a first VH-CDR2, a first VH-CDR3, a first VL-CDR1, a first VL-CDR2 and a first VL-CDR3 comprising the following amino acid sequences, respectively (according to Chothia): SEQ ID NOs: 17, 18, 23, 20, 24 and 25; and the second antigen binding domain comprises one EC domain of CD4 comprising an amino acid sequence is at least 95% (e.g., at least 96%, at least 97%, at least 98%, or at least 99%) identical to a CD4 EC domain of SEQ ID NO: 746. In some embodiments, the first antigen binding domain comprises a first VH-CDR1, a first VH-CDR2, a first VH-CDR3, a first VL-CDR1, a first VL-CDR2 and a first VL-CDR3 comprising the following amino acid sequences, respectively (according to Chothia): SEQ ID NOs: 17, 18, 23, 20, 24 and 25; and the second antigen binding domain comprises one EC domain of CD4 comprising the amino acid sequence of SEQ ID NO: 746.

[0143] In some embodiments, provided is a multi-specific antigen binding molecule comprising a first antigen binding domain that binds to human CD3 and a second antigen binding domain that binds to HIV gp120, wherein the first antigen binding domain comprises a first VH-CDR1, a first VH-CDR2, a first VH-CDR3, a first VL-CDR1, a first VL-CDR2 and a first VL-CDR3 comprising the following amino acid sequences, respectively (according to IMGT): SEQ ID NOs: 28, 29, 32, 31, 24 and 10; and the second antigen binding domain comprises one or more EC domains of CD4 comprising an amino acid sequence that comprises or is at least 80%, at least 85%, at least 90%, at least 91%, at least 92%, at least 93%, at least 94%, at least 95%, at least 96%, at least 97%, at least 98%, or at least 99%, identical to a CD4 EC domain selected from the group consisting of SEQ ID NOs: 746-749, e.g., SEQ ID NO: 746.

[0144] In some embodiments, the first antigen binding domain comprises a first VH-CDR1, a first VH-CDR2, a first VH-CDR3, a first VL-CDR1, a first VL-CDR2 and a first VL-CDR3 comprising the following amino acid sequences, respectively (according to IMGT): SEQ ID NOs: 28, 29, 32, 31, 24 and 10; and the second antigen binding domain comprises one EC domain of CD4 comprising an amino acid sequence is at least 95% (e.g., at least 96%, at least 97%, at least 98%, or at least 99%) identical to a CD4 EC domain of SEQ ID NO: 746. In some embodiments, the first antigen binding domain comprises a first VH-CDR1, a first VH-CDR2, a first VH-CDR3, a first VL-CDR1, a first VL-CDR2 and a first VL-CDR3 comprising the following amino acid sequences, respectively (according to IMGT): SEQ ID NOs: 28, 29, 32, 31, 24 and 10; and the second antigen binding domain comprises one EC domain of CD4 comprising the amino acid sequence of SEQ ID NO: 746.

[0145] In some embodiments, provided is a multi-specific antigen binding molecule comprising a first antigen binding domain that binds to human CD3 and a second antigen binding domain that binds to HIV gp120, wherein the first antigen binding domain comprises a first VH-CDR1, a first VH-CDR2, a first VH-CDR3, a first VL-CDR1, a first VL-CDR2 and a first VL-CDR3 comprising the following amino acid sequences, respectively (according to Honegger): SEQ ID NOs: 34, 42, 40, 37, 41 and 25; or SEQ ID NOs: 34, 43, 40, 37, 41 and 25; and the second antigen binding domain comprises one or more EC domains of CD4 comprising an amino acid sequence that comprises or is at least 80%, at least 85%, at least 90%, at least 91%, at least 92%, at least 93%, at least 94%, at least 95%, at least 96%, at least 97%, at least 98%, or at least 99%, identical to a CD4 EC domain selected from the group consisting of SEQ ID NOs: 746-749, e.g., SEQ ID NO: 746.

[0146] In some embodiments, the first antigen binding domain comprises a first VH-CDR1, a first VH-CDR2, a first VH-CDR3, a first VL-CDR1, a first VL-CDR2 and a first VL-CDR3 comprising the following amino acid sequences, respectively (according to Honegger): SEQ ID NOs: 34, 43, 40, 37, 41 and 25; and the second antigen binding domain comprises one EC domain of CD4 comprising an amino acid sequence that comprises or is at least 80%, at least 85%, at least 90%, at least 91%, at least 92%, at least 93%, at least 94%, at least 95%, at least 96%, at least 97%, at least 98%, or at least 99%, identical to a CD4 EC domain of SEQ ID NO: 746. In some embodiments, the first antigen binding domain comprises a first VH-CDR1, a first VH-CDR2, a first VH-CDR3, a first VL-CDR1, a first VL-CDR2 and a first VL-CDR3 comprising the following amino acid sequences, respectively (according to Honegger): SEQ ID NOs: 34, 43, 40, 37, 41 and 25; and the second antigen binding domain comprises one EC domain of CD4 comprising an amino acid sequence is at least 95% (e.g., at least 96%, at least 97%, at least 98%, or at least 99%) identical to a CD4 EC domain of SEQ ID NO: 746. In some embodiments, the first antigen binding domain comprises a first VH-CDR1, a first VH-CDR2, a first VH-CDR3, a first VL-CDR1, a first VL-CDR2 and a first VL-CDR3 comprising the following amino acid sequences, respectively (according to Honegger): SEQ ID NOs: 34, 43, 40, 37, 41 and 25; and the second antigen binding domain comprises one EC domain of CD4 comprising the amino acid sequence of SEQ ID NO: 746.

[0147] In some embodiments, provided is a multi-specific antigen binding molecule comprising a first antigen binding domain that binds to human CD3 and a second antigen binding domain that binds to HIV gp120, wherein the first antigen binding domain comprises a first VH and a first VL comprising the amino acid sequences set forth, respectively, or comprising amino acid sequences that are at least 80%, at least 85%, at least 90%, at least 91%, at least 92%, at least 93%, at least 94%, at least 95%, at least 96%, at least 97%, at least 98%, or at least 99% identical to the amino acid sequences set forth, respectively: SEQ ID NOs: 49 and 55; SEQ ID NOs: 50 and 55; SEQ ID NOs: 50 and 56; SEQ ID NOs: 51 and 55; or SEQ ID NOs: 51 and 56; and the second antigen binding domain comprises one or more EC domains of CD4 comprising an amino acid sequence that comprises or is at least 80%, at least 85%, at least 90%, at least 91%, at least 92%, at least 93%, at least 94%, at least 95%, at least 96%, at least 97%, at least 98%, or at least 99%, identical to a CD4 EC domain selected from the group consisting of SEQ ID NOs: 746-749, e.g., SEQ ID NO: 746.

[0148] In some embodiments, the first antigen binding domain comprises a first VH and a first VL comprising amino acid sequences that are at least 80%, at least 85%, at least 90%, at least 91%, at least 92%, at least 93%, at least 94%, at least 95%, at least 96%, at least 97%, at least 98%, or at least 99% identical to the amino acid sequences set forth, respectively: SEQ ID NOs: 50 and 56; and the second antigen binding domain comprises one EC domain of CD4 comprising an amino acid sequence that is at least 80%, at least 85%, at least 90%, at least 91%, at least 92%, at least 93%, at least 94%, at least 95%, at least 96%, at least 97%, at least 98%, or at least 99%, identical to a CD4 EC domain of SEQ ID NO: 746. In some embodiments, the first antigen binding domain comprises a first VH and a first VL comprising amino acid sequences that are at least 95% identical to the amino acid sequences set forth, respectively: SEQ ID NOs: 50 and 56; and the second antigen binding domain comprises one EC domain of CD4 comprising an amino acid sequence that is at least 95% identical to a CD4 EC domain of SEQ ID NO: 746. In some embodiments, the first antigen binding domain comprises a first VH and a first VL comprising amino acid sequences that are at least 95% identical to the amino acid sequences set forth, respectively: SEQ ID NOs: 50 and 56; and the second antigen binding domain comprises one EC domain of CD4 comprising an amino acid sequence that is at least 99% identical to a CD4 EC domain of SEQ ID NO: 746. In some embodiments, the first antigen binding domain comprises a first VH and a first VL comprising amino acid sequences that are at least 95% identical to the amino acid sequences set forth, respectively: SEQ ID NOs: 50 and 56; and the second antigen binding domain comprises one EC domain of CD4 comprising an amino acid sequence of SEQ ID NO: 746. In some embodiments, the first antigen binding domain comprises a first VH and a first VL comprising amino acid sequences that are at least 99% identical to the amino acid sequences set forth, respectively: SEQ ID NOs: 50 and 56; and the second antigen binding domain comprises one EC domain of CD4 comprising an amino acid sequence that is at least 95% identical to a CD4 EC domain of SEQ ID NO: 746. In some embodiments, the first antigen binding domain comprises a first VH and a first VL comprising the amino acid sequences set forth, respectively: SEQ ID NOs: 50 and 56; and the second antigen binding domain comprises one EC domain of CD4 comprising an amino acid sequence that is at least 99% identical to a CD4 EC domain of SEQ ID NO: 746. In some embodiments, the first antigen binding domain comprises a first VH and a first VL comprising amino acid sequences that are at least 99% identical to the amino acid sequences set forth, respectively: SEQ ID NOs: 50 and 56; and the second antigen binding domain comprises one EC domain of CD4 comprising an amino acid sequence that is at least 99% identical to a CD4 EC domain of SEQ ID NO: 746. In some embodiments, the first antigen binding domain comprises a first VH comprising the amino acid sequence of SEQ ID NO: 50 and a first VL comprising an amino acid sequence that is at least 95% identical to the amino acid sequence of SEQ ID NO: 56; and the second antigen binding domain comprises one EC domain of CD4 comprising an amino acid sequence that is at least 95% identical to a CD4 EC domain of SEQ ID NO: 746. In some embodiments, the first antigen binding domain comprises a first VH comprising the amino acid sequence of SEQ ID NO: 50 and a first VL comprising an amino acid sequence that is at least 95% identical to the amino acid sequence of SEQ ID NO: 56; and the second antigen binding domain comprises one EC domain of CD4 comprising an amino acid sequence that is at least 99% identical to a CD4 EC domain of SEQ ID NO: 746. In some embodiments, the first antigen binding domain comprises a first VH comprising the amino acid sequence of SEQ ID NO: 50 and a first VL comprising an amino acid sequence that is at least 99% identical to the amino acid sequence of SEQ ID NO: 56; and the second antigen binding domain comprises one EC domain of CD4 comprising an amino acid sequence that is at least 95% identical to a CD4 EC domain of SEQ ID NO: 746. In some embodiments, the first antigen binding domain comprises a first VH comprising the amino acid sequence of SEQ ID NO: 50 and a first VL comprising an amino acid sequence that is at least 99% identical to the amino acid sequence of SEQ ID NO: 56; and the second antigen binding domain comprises one EC domain of CD4 comprising an amino acid sequence that is at least 99% identical to a CD4 EC domain of SEQ ID NO: 746. In some embodiments, the first antigen binding domain comprises a first VH comprising an amino acid sequence that is at least 95% identical to the amino acid sequence of SEQ ID NO: 50 and a first VL comprising the amino acid sequence of SEQ ID NO: 56; and the second antigen binding domain comprises one EC domain of CD4 comprising an amino acid sequence that is at least 95% identical to a CD4 EC domain of SEQ ID NO: 746. In some embodiments, the first antigen binding domain comprises a first VH comprising an amino acid sequence that is at least 95% identical to the amino acid sequence of SEQ ID NO: 50 and a first VL comprising the amino acid sequence of SEQ ID NO: 56; and the second antigen binding domain comprises one EC domain of CD4 comprising an amino acid sequence that is at least 99% identical to a CD4 EC domain of SEQ ID NO: 746. In some embodiments, the first antigen binding domain comprises a first VH comprising an amino acid sequence that is at least 99% identical to the amino acid sequence of SEQ ID NO: 50 and a first VL comprising the amino acid sequence of SEQ ID NO: 56; and the second antigen binding domain comprises one EC domain of CD4 comprising an amino acid sequence that is at least 95% identical to a CD4 EC domain of SEQ ID NO: 746. In some embodiments, the first antigen binding domain comprises a first VH comprising an amino acid sequence that is at least 99% identical to the amino acid sequence of SEQ ID NO: 50 and a first VL comprising the amino acid sequence of SEQ ID NO: 56; and the second antigen binding domain comprises one EC domain of CD4 comprising an amino acid sequence that is at least 99% identical to a CD4 EC domain of SEQ ID NO: 746. In some embodiments, the first antigen binding domain comprises a first VH and a first VL comprising the amino acid sequences set forth, respectively: SEQ ID NOs: 50 and 56; and the second antigen binding domain comprises one EC domain of CD4 comprising an amino acid sequence of SEQ ID NO: 746.

[0149] In some embodiments, the first antigen binding domain comprises a first VH and a first VL comprising amino acid sequences that are at least 80%, at least 85%, at least 90%, at least 91%, at least 92%, at least 93%, at least 94%, at least 95%, at least 96%, at least 97%, at least 98%, or at least 99% identical to the amino acid sequences set forth, respectively: SEQ ID NOs: 51 and 56; and the second antigen binding domain comprises one EC domain of CD4 comprising an amino acid sequence that is at least 80%, at least 85%, at least 90%, at least 91%, at least 92%, at least 93%, at least 94%, at least 95%, at least 96%, at least 97%, at least 98%, or at least 99%, identical to a CD4 EC domain of SEQ ID NO: 746. In some embodiments, the first antigen binding domain comprises a first VH and a first VL comprising amino acid sequences that are at least 95% identical to the amino acid sequences set forth, respectively: SEQ ID NOs: 51 and 56; and the second antigen binding domain comprises one EC domain of CD4 comprising an amino acid sequence that is at least 95% identical to a CD4 EC domain of SEQ ID NO: 746. In some embodiments, the first antigen binding domain comprises a first VH and a first VL comprising amino acid sequences that are at least 95% identical to the amino acid sequences set forth, respectively: SEQ ID NOs: 51 and 56; and the second antigen binding domain comprises one EC domain of CD4 comprising an amino acid sequence that is at least 99% identical to a CD4 EC domain of SEQ ID NO: 746. In some embodiments, the first antigen binding domain comprises a first VH and a first VL comprising amino acid sequences that are at least 95% identical to the amino acid sequences set forth, respectively: SEQ ID NOs: 51 and 56; and the second antigen binding domain comprises one EC domain of CD4 comprising an amino acid sequence of SEQ ID NO: 746. In some embodiments, the first antigen binding domain comprises a first VH and a first VL comprising amino acid sequences that are at least 99% identical to the amino acid sequences set forth, respectively: SEQ ID NOs: 51 and 56; and the second antigen binding domain comprises one EC domain of CD4 comprising an amino acid sequence that is at least 95% identical to a CD4 EC domain of SEQ ID NO: 746. In some embodiments, the first antigen binding domain comprises a first VH and a first VL comprising the amino acid sequences set forth, respectively: SEQ ID NOs: 51 and 56; and the second antigen binding domain comprises one EC domain of CD4 comprising an amino acid sequence that is at least 99% identical to a CD4 EC domain of SEQ ID NO: 746. In some embodiments, the first antigen binding domain comprises a first VH and a first VL comprising amino acid sequences that are at least 99% identical to the amino acid sequences set forth, respectively: SEQ ID NOs: 51 and 56; and the second antigen binding domain comprises one EC domain of CD4 comprising an amino acid sequence that is at least 99% identical to a CD4 EC domain of SEQ ID NO: 746. In some embodiments, the first antigen binding domain comprises a first VH comprising the amino acid sequence of SEQ ID NO: 51 and a first VL comprising an amino acid sequence that is at least 95% identical to the amino acid sequence of SEQ ID NO: 56; and the second antigen binding domain comprises one EC domain of CD4 comprising an amino acid sequence that is at least 95% identical to a CD4 EC domain of SEQ ID NO: 746. In some embodiments, the first antigen binding domain comprises a first VH comprising the amino acid sequence of SEQ ID NO: 51 and a first VL comprising an amino acid sequence that is at least 95% identical to the amino acid sequence of SEQ ID NO: 56; and the second antigen binding domain comprises one EC domain of CD4 comprising an amino acid sequence that is at least 99% identical to a CD4 EC domain of SEQ ID NO: 746. In some embodiments, the first antigen binding domain comprises a first VH comprising the amino acid sequence of SEQ ID NO: 51 and a first VL comprising an amino acid sequence that is at least 99% identical to the amino acid sequence of SEQ ID NO: 56; and the second antigen binding domain comprises one EC domain of CD4 comprising an amino acid sequence that is at least 95% identical to a CD4 EC domain of SEQ ID NO: 746. In some embodiments, the first antigen binding domain comprises a first VH comprising the amino acid sequence of SEQ ID NO: 51 and a first VL comprising an amino acid sequence that is at least 99% identical to the amino acid sequence of SEQ ID NO: 56; and the second antigen binding domain comprises one EC domain of CD4 comprising an amino acid sequence that is at least 99% identical to a CD4 EC domain of SEQ ID NO: 746. In some embodiments, the first antigen binding domain comprises a first VH comprising an amino acid sequence that is at least 95% identical to the amino acid sequence of SEQ ID NO: 51 and a first VL comprising the amino acid sequence of SEQ ID NO: 56; and the second antigen binding domain comprises one EC domain of CD4 comprising an amino acid sequence that is at least 95% identical to a CD4 EC domain of SEQ ID NO: 746. In some embodiments, the first antigen binding domain comprises a first VH comprising an amino acid sequence that is at least 95% identical to the amino acid sequence of SEQ ID NO: 51 and a first VL comprising the amino acid sequence of SEQ ID NO: 56; and the second antigen binding domain comprises one EC domain of CD4 comprising an amino acid sequence that is at least 99% identical to a CD4 EC domain of SEQ ID NO: 746. In some embodiments, the first antigen binding domain comprises a first VH comprising an amino acid sequence that is at least 99% identical to the amino acid sequence of SEQ ID NO: 51 and a first VL comprising the amino acid sequence of SEQ ID NO: 56; and the second antigen binding domain comprises one EC domain of CD4 comprising an amino acid sequence that is at least 95% identical to a CD4 EC domain of SEQ ID NO: 746. In some embodiments, the first antigen binding domain comprises a first VH comprising an amino acid sequence that is at least 99% identical to the amino acid sequence of SEQ ID NO: 51 and a first VL comprising the amino acid sequence of SEQ ID NO: 56; and the second antigen binding domain comprises one EC domain of CD4 comprising an amino acid sequence that is at least 99% identical to a CD4 EC domain of SEQ ID NO: 746. In some embodiments, the first antigen binding domain comprises a first VH and a first VL comprising the amino acid sequences set forth, respectively: SEQ ID NOs: 51 and 56; and the second antigen binding domain comprises one EC domain of CD4 comprising an amino acid sequence of SEQ ID NO: 746.

[0150] In some embodiments, the second antigen binding domain binds to an epitope or region of gp120 in the gp120/gp41 interface and competes with or comprises VH and VL regions from an antibody selected from the group consisting of PGT-151, CAP248-2B, 35022, 8ANC195, ACS202, VRC34 and VRC34.01. Additional broadly neutralizing antibodies that bind to gp120 in the gp120/gp41 interface and which can be used in the second antigen binding domain of the herein described multi-specific antigen binding molecules are described, e.g., in WO 2011/038290; WO 2012/030904 and WO2017/079479, which are hereby incorporated herein by reference in their entireties for all purposes.

[0151] In some embodiments, the second antigen binding domain binds to an epitope or region of the gp120 silent face and competes with or comprises VH and VL regions from an antibody selected from VRC-PG05 and SF12. See, e.g., Schoofs, et al., Immunity. (2019) 50(6):1513-1529.

[0152] In some embodiments, the second antigen binding domain binds to an epitope or region of gp41 in the membrane proximal region (MPER). Additional broadly neutralizing antibodies that bind to gp41 in the MPER and which can be used in the second antigen binding domain of the herein described multi-specific antigen binding molecules are described, e.g., in WO 2011/034582; WO 2011/038290; WO 2011/046623 and WO 2013/070776, which are hereby incorporated herein by reference in their entireties for all purposes.

[0153] In some embodiments, the second antigen binding domain binds to an epitope or region of gp41 in the membrane proximal region (MPER) and competes with or comprises VH and VL regions from an antibody selected from the group consisting of 10E8, 10E8v4, 10E8-5R-100cF, 4E10, DH511.11P, 2F5, 7b2, and LN01.

[0154] In some embodiments, the second antigen binding domain binds to an epitope or region of the gp41 fusion peptide and competes with or comprises VH and VL regions from an antibody selected from the group consisting of VRC34 and ACS202.

[0155] Additional broadly neutralizing antibodies which can be used in the second antigen binding domain of the herein described multi-specific antigen binding molecules are described, e.g., in U.S. Pat. Nos. 8,673,307; 9,493,549; 9,783,594; 10,239,935; and patent publications numbers US2018371086, US2020223907, WO 2012/154312; WO2012/158948; WO 2013/086533; WO 2013/142324; WO2014/063059; WO 2014/089152, WO 2015/048462; WO 2015/103549; WO 2015/117008; WO2016/014484; WO 2016/154003; WO 2016/196975; WO 2016/149710; WO2017/096221; WO 2017/133639; and WO 2017/133640, which are hereby incorporated herein by reference in their entireties for all purposes. Additional examples include those described in Sajadi, et al., Cell. (2018) 173(7):1783-1795; Sajadi, et al., J Infect Dis. (2016) 213(1):156-64; Klein et al., Nature, 492(7427): 118-22 (2012), Horwitz et al., Proc Natl Acad Sci USA, 110(41): 16538-43 (2013), Scheid, et al., Science, 333: 1633-1637 (2011), Scheid, et al., Nature, 458:636-640 (2009), Eroshkin et al, Nucleic Acids Res., 42 (Database issue):D1 133-9 (2014), Mascola et al., Immunol Rev., 254(1):225-44 (2013), such as 2F5, 4E10, M66.6, CAP206-CH12, 10E8, 10E8v4, 10E8-5R-100cF, DH511.11P, 7b2, and LN01 (all of which bind the MPER of gp41); PG9, PG16, CAP256, CAP256-VRC26, CAP256-VRC26.25, CH01-04 (all of which bind V1V2-glycan), 2G12 (which binds to outer domain glycan); b12, F105, VRC01, VRC07, VRC07-523, VRC03, VRC06, VRC06b01 VRC08, VRC0801, NIH45-46, 3BNC117, 3BNC60, PGV04 (a.k.a., VRC-PG04); CH103, 44-VRC13.01, 1NC9, 12A12, N6, 1-18, N49-P7, NC-Cow1, IOMA, CH235 and CH235.12, N49P6, N49P7, N49P11, N49P9 and N60P25 (all of which bind to the CD4 binding site), which are hereby incorporated herein by reference in their entireties for all purposes.

[0156] In some embodiments, the second antigen binding domain comprises a second VH comprising a second VH-CDR1, a second VH-CDR2, and a second VH-CDR3; and a second VL comprising a second VL-CDR1, a second VL-CDR2, and a second VH-CDR3; comprising the amino acid sequences (according to Kabat) set forth, respectively, in: SEQ ID NOs: 76, 77, 78, 79, 80 and 81; SEQ ID NOs: 76, 82, 78, 79, 80 and 81; SEQ ID NOs: 83, 84, 85, 86, 80 and 87; SEQ ID NOs: 83, 88, 85, 86, 80 and 87; SEQ ID NOs: 90, 91, 92, 93, 94 and 95; SEQ ID NOs: 90, 91, 96, 93, 94 and 95; SEQ ID NOs: 97, 98, 99, 100, 101 and 102; SEQ ID NOs: 103, 104, 105, 106, 94 and 107; SEQ ID NOs: 108, 109, 110, 111, 112 and 113; SEQ ID NOs: 114, 115, 116, 117, 118 and 119; SEQ ID NOs: 114, 120, 121, 122, 118 and 123; SEQ ID NOs: 124, 125, 126, 127, 128 and 113; SEQ ID NOs: 129, 115, 131, 127, 118 and 113; SEQ ID NOs: 132, 133, 134, 135, 136 and 137; SEQ ID NOs: 138, 139, 140, 141, 142 and 143; SEQ ID NOs: 144, 145, 146, 147, 148 and 143; SEQ ID NOs: 149, 150, 151, 152, 153 and 143; SEQ ID NOs: 154, 155, 156, 157, 158 and 159; SEQ ID NOs: 160, 161, 162, 163, 164 and 165; SEQ ID NOs: 166, 161, 167, 163, 164 and 165; SEQ ID NOs: 168, 169, 170, 171, 172 and 173; SEQ ID NOs: 168, 174, 170, 171, 172 and 173; SEQ ID NOs: 175, 176, 177, 171, 172 and 173; SEQ ID NOs: 178, 179, 180, 181, 182 and 183; SEQ ID NOs: 184, 185, 186, 187, 188 and 189; SEQ ID NOs: 190, 191, 192, 193, 194 and 195; SEQ ID NOs: 196, 197, 198, 199, 200 and 201; SEQ ID NOs: 202, 203, 204, 205, 206 and 207; SEQ ID NOs: 208, 209, 210, 211, 212 and 213; SEQ ID NOs: 214, 215, 216, 217, 218 and 219; SEQ ID NOs: 214, 220, 216, 221, 218 and 219; SEQ ID NOs: 214, 220, 222, 221, 218 and 219; SEQ ID NOs: 223, 224, 225, 226, 227 and 228; or SEQ ID NOs: 229, 230, 231, 232, 233 and 234; SEQ ID NOs: 902, 903, 904, 905, 906 and 907; SEQ ID NOs: 908, 909, 910, 911, 912 and 913; SEQ ID NOs: 914, 915, 916, 917, 918 and 919; or SEQ ID NOs: 920, 921, 922, 923, 924 and 925.

[0157] In some embodiments, the second antigen binding domain comprises a second VH comprising a second VH-CDR1, a second VH-CDR2, and a second VH-CDR3; and a second VL comprising a second VL-CDR1, a second VL-CDR2, and a second VH-CDR3; comprising the amino acid sequences (according to Chothia) set forth, respectively, in: SEQ ID NOs: 235, 236, 237, 238, 239 and 240; SEQ ID NOs: 241, 242, 243, 244, 239 and 245; SEQ ID NOs: 246, 242, 247, 244, 239 and 245; SEQ ID NOs: 248, 249, 250, 251, 239 and 252; SEQ ID NOs: 248, 249, 253, 251, 239 and 252; SEQ ID NOs: 254, 255, 256, 257, 258 and 259; SEQ ID NOs: 260, 261, 262, 263, 239 and 264; SEQ ID NOs: 265, 266, 267, 268, 269 and 270; SEQ ID NOs: 271, 272, 273, 274, 275 and 270; SEQ ID NOs: 271, 276, 277, 278, 275 and 279; SEQ ID NOs: 280, 281, 282, 283, 284 and 270; SEQ ID NOs: 285, 272, 286, 283, 275 and 270; SEQ ID NOs: 287, 288, 289, 290, 291 and 292; SEQ ID NOs: 293, 294, 295, 296, 297 and 298; SEQ ID NOs: 299, 300, 301, 302, 303 and 298; SEQ ID NOs: 304, 300, 305, 406, 307 and 298; SEQ ID NOs: 308, 309, 310, 311, 312 and 313; SEQ ID NOs: 314, 315, 316, 317, 318 and 165; SEQ ID NOs: 320, 315, 321, 317, 318 and 165; SEQ ID NOs: 322, 323, 324, 325, 326 and 327; SEQ ID NOs: 322, 328, 324, 325, 326 and 327; SEQ ID NOs: 329, 323, 330, 325, 326 and 327; SEQ ID NOs: 331, 332, 333, 334, 335 and 336; SEQ ID NOs: 337, 338, 339, 340, 341 and 342; SEQ ID NOs: 343, 344, 345, 346, 341 and 347; SEQ ID NOs:348, 349, 350, 351, 352 and 353; SEQ ID NOs: 354, 355, 356, 357, 358 and 359; SEQ ID NOs: 360, 361, 362, 363, 364 and 365; SEQ ID NOs: 366, 367, 368, 369, 370 and 371; SEQ ID NOs: 366, 361, 368, 369, 370 and 371; SEQ ID NOs: 372, 361, 373, 369, 370 and 371; SEQ ID NOs: 374, 375, 376, 377, 378 and 379; SEQ ID NOs: 380, 381, 382, 383, 384 and 385; SEQ ID NOs: 926, 927, 928, 929, 930 and 931; SEQ ID NOs: 932, 933, 934, 935, 936 and 937; SEQ ID NOs: 938, 939, 940, 941, 942 and 943; or SEQ ID NOs: 944, 945, 946, 947, 948 and 949.

[0158] In some embodiments, the second antigen binding domain comprises a second VH comprising a second VH-CDR1, a second VH-CDR2, and a second VH-CDR3; and a second VL comprising a second VL-CDR1, a second VL-CDR2, and a second VH-CDR3; comprising the amino acid sequences (according to IMGT) set forth, respectively, in: SEQ ID NOs: 386, 387, 388, 389, 239 and 81; SEQ ID NOs: 390, 391, 392, 393, 239 and 87; SEQ ID NOs: 390, 391, 394, 393, 239 and 87; SEQ ID NOs: 395, 396, 397, 393, 239 and 87; SEQ ID NOs: 398, 399, 400, 401, 239 and 95; SEQ ID NOs: 398, 399, 402, 401, 239 and 95; SEQ ID NOs: 403, 404, 405, 406, 258 and 102; SEQ ID NOs: 407, 408, 409, 410, 239 and 107; SEQ ID NOs: 411, 412, 413, 414, 269 and 113; SEQ ID NOs: 415, 416, 417, 418, 275 and 119; SEQ ID NOs: 415, 419, 420, 421, 275 and 123; SEQ ID NOs: 422, 423, 424, 425, 275 and 113; SEQ ID NOs: 426, 416, 427, 425, 275 and 113; SEQ ID NOs: 428, 429, 430, 431, 291 and 137; SEQ ID NOs: 432, 433, 434, 435, 297 and 143; SEQ ID NOs: 436, 437, 438, 439, 303 and 143; SEQ ID NOs: 440, 437, 441, 442, 307 and 143; SEQ ID NOs: 443, 444, 445, 446, 312 and 159; SEQ ID NOs: 447, 448, 449, 450, 318 and 165; SEQ ID NOs: 451, 448, 452, 450, 318 and 165; SEQ ID NOs: 453, 454, 455, 456, 326 and 173; SEQ ID NOs: 453, 457, 455, 456, 326 and 173; SEQ ID NOs: 458, 459, 460, 456, 326 and 173; SEQ ID NOs: 461, 462, 463, 464, 335 and 183; SEQ ID NOs: 465, 466, 467, 468, 341 and 189; SEQ ID NOs: 469, 470, 471, 472, 341 and 195; SEQ ID NOs: 473, 474, 475, 476, 352 and 201; SEQ ID NOs: 477, 478, 479, 480, 358 and 207; SEQ ID NOs: 481, 482, 483, 484, 364 and 213; SEQ ID NOs: 485, 486, 487, 488, 370 and 219; SEQ ID NOs: 485, 482, 487, 488, 370 and 219; SEQ ID NOs: 489, 482, 490, 488, 370 and 219; SEQ ID NOs: 491, 492, 493, 494, 378 and 228; SEQ ID NOs: 495, 496, 497, 498, 384 and 234; SEQ ID NOs: 950, 951, 952, 953, 930 and 907; SEQ ID NOs: 954, 955, 956, 957, 936 and 913; SEQ ID NOs: 958, 959, 960, 961, 942 and 919; or SEQ ID NOs: 962, 963, 964, 965, 948 and 925.

[0159] In some embodiments, the second antigen binding domain comprises a second VH comprising a second VH-CDR1, a second VH-CDR2, and a second VH-CDR3; and a second VL comprising a second VL-CDR1, a second VL-CDR2, and a second VH-CDR3; comprising the amino acid sequences (according to Honegger) set forth, respectively, in: SEQ ID NOs: 499, 500, 501, 238, 502 and 240; SEQ ID NOs: 499, 503, 501, 238, 502 and 240; SEQ ID NOs: 505, 506, 507, 244, 502 and 245; SEQ ID NOs: 508, 509, 510, 244, 502 and 245; SEQ ID NOs: 511, 512, 513, 251, 514 and 252; SEQ ID NOs: 511, 512, 515, 251, 514 and 252; SEQ ID NOs: 516, 517, 518, 257, 519 and 259; SEQ ID NOs: 520, 521, 522, 264, 523 and 264; SEQ ID NOs: 524, 525, 526, 268, 527 and 270; SEQ ID NOs: 528, 529, 530, 274, 531 and 270; SEQ ID NOs: 528, 532, 533, 278, 531 and 279; SEQ ID NOs: 534, 535, 536, 283, 537 and 270; SEQ ID NOs: 1090, 529, 538, 283, 531 and 270; SEQ ID NOs: 539, 540, 541, 290, 542 and 292; SEQ ID NOs: 543, 544, 545, 546, 547 and 298; SEQ ID NOs: 548, 549, 550, 1091, 551 and 298; SEQ ID NOs: 552, 553, 554, 555, 556 and 298; SEQ ID NOs: 557, 558, 559, 311, 560 and 313; SEQ ID NOs: 561, 562, 563, 564, 565 and 165; SEQ ID NOs: 566, 562, 1092, 564, 567 and 165; SEQ ID NOs: 568, 569, 570, 571, 572 and 327; SEQ ID NOs: 568, 573, 570, 571, 572 and 327; SEQ ID NOs: 574, 575, 576, 571, 572 and 327; SEQ ID NOs: 577, 578, 579, 580, 581 and 336; SEQ ID NOs: 582, 583, 584, 340, 585 and 342; SEQ ID NOs: 586, 587, 588, 346, 589 and 347; SEQ ID NOs: 590, 591, 592, 351, 593 and 353; SEQ ID NOs: 594, 595, 596, 597, 598 and 359; SEQ ID NOs: 599, 600, 601, 602, 603 and 365; SEQ ID NOs: 604, 605, 606, 607, 608 and 371; SEQ ID NOs: 604, 609, 606, 607, 608 and 371; SEQ ID NOs: 610, 609, 611, 607, 608 and 371; SEQ ID NOs: 612, 613, 614, 615, 616 and 379; SEQ ID NOs: 617, 618, 619, 620, 621 and 385; SEQ ID NOs: 966, 967, 968, 969, 970 and 931; SEQ ID NOs: 971, 972, 973, 974, 975 and 937; SEQ ID NOs: 976, 977, 978, 941, 979 and 943; or SEQ ID NOs: 980, 981, 982, 983, 984 and 949.

[0160] In some embodiments, the second VH and the second VL comprise the amino acid sequences set forth, respectively, or comprise amino acid sequences that are at least 80%, at least 85%, at least 90%, at least 91%, at least 92%, at least 93%, at least 94%, at least 95%, at least 96%, at least 97%, at least 98%, or at least 99% identical to the amino acid sequences set forth, respectively, in: SEQ ID NOs: 622 and 623; SEQ ID NOs: 624 and 625; SEQ ID NOs: 624 and 626; SEQ ID NOs: 627 and 628; SEQ ID NOs: 629 and 630; SEQ ID NOs: 631 and 632; SEQ ID NOs: 633 and 634; SEQ ID NOs: 635 and 636; SEQ ID NOs: 637 and 638; SEQ ID NOs: 639 and 640; SEQ ID NOs: 641 and 642; SEQ ID NOs: 643 and 644; SEQ ID NOs: 645 and 646; SEQ ID NOs: 647 and 648; SEQ ID NOs: 649 and 650; SEQ ID NOs: 651 and 652; SEQ ID NOs: 653 and 654; SEQ ID NOs: 655 and 656; SEQ ID NOs: 657 and 658; SEQ ID NOs: 659 and 660; SEQ ID NOs: 661 and 662; SEQ ID NOs: 663 and 664; SEQ ID NOs: 665 and 666; SEQ ID NOs: 667 and 668; SEQ ID NOs: 669 and 670; SEQ ID NOs:671 and 672; SEQ ID NOs:673 and 670; SEQ ID NOs: 674 and 675; SEQ ID NOs: 676 and 677; SEQ ID NOs: 678 and 679; SEQ ID NOs: 680 and 681; SEQ ID NOs: 682 and 683; SEQ ID NOs: 684 and 685; SEQ ID NOs: 686 and 687; SEQ ID NOs: 688 and 689; SEQ ID NOs: 690 and 691; SEQ ID NOs: 692 and 693; SEQ ID NOs: 694 and 695; SEQ ID NOs: 985 and 986; SEQ ID NOs: 987 and 988; SEQ ID NOs: 989 and 990; or SEQ ID NOs: 991 and 992.

[0161] Illustrative sequences of complementarity determining regions (CDRs) of the first antigen binding domains of the multi-specific antigen binding molecules, targeting HIV gp120, are provided in Tables D1, D2, D3 and D4. Illustrative sequences of the VH and VL of the second antigen binding domains of the multi-specific antigen binding molecules, targeting HIV gp120, are provided in Table E.

TABLE D1
CDRs (Kabat) for illustrative anti-HIV antigen binding arm

| Ab | | | | | VL - | |
|---|---|---|---|---|---|---|
| Name | VH - CDR1 | VH - CDR2 | VH - CDR3 | VL - CDR1 | CDR2 | VL - CDR3 |
| 1 | DSYWS | YVHKSGDTNYSPSLKS | TLHGRRIYGIVAFN | GEKSLGSRAVQ | NNQDRPS | HIWDSRVPTKWV |
| | SEQ ID NO: | SEQ ID NO: 77 | EWFTYFYMDV | SEQ ID NO: 79 | SEQ ID | SEQ ID NO: 81 |
| | 76 | | SEQ ID NO: 78 | | NO: 80 | |
| 2 | DSYWS | YVHKSGDTNYNPSLKS | TLHGRRIYGIVAFN | GEKSLGSRAVQ | NNQDRPS | HIWDSRVPTKWV |
| | SEQ ID NO: | SEQ ID NO: 82 | EWFTYFYMDV | SEQ ID NO: 79 | SEQ ID | SEQ ID NO: 81 |
| | 76 | | SEQ ID NO: 78 | | NO: 80 | |
| 3 | NYYWT | YISDRESATYNPSLNS | ARRGQRIYGVVSFG | GRQALGSRAVQ | NNQDRPS | HMWDSRSGFSWS |
| | SEQ ID NO: | SEQ ID NO: 84 | EFFYYYSMDV | SEQ ID NO: 86 | SEQ ID | SEQ ID NO: 87 |
| | 83 | | SEQ ID NO: 85 | | NO: 80 | |
| 4 | NYYWT | YISDRETTTYNPSLNS | ARRGQRIYGVVSFG | GRQALGSRAVQ | NNQDRPS | HMWDSRSGFSWS |
| | SEQ ID NO: | SEQ ID NO: 88 | EFFYYYYMDV | SEQ ID NO: 86 | SEQ ID | SEQ ID NO: 87 |
| | 83 | | SEQ ID NO: 89 | | NO: 80 | |
| 5 | GRFWS | YFSDTDRSEYNPSLRS | AQQGKRIYGIVSFG | GERSRGSRAVQ | NNQDRPA | HYWDSRSPISWI |
| | SEQ ID NO: | SEQ ID NO: 91 | EFFYYYYMDA | SEQ ID NO: 93 | SEQ ID | SEQ ID NO: 95 |
| | 90 | | SEQ ID NO: 92 | | NO: 94 | |
| 6 | GRFWS | YFSDTDRSEYNPSLRS | AQQGKRIYGIVSFG | GERSRGSRAVQ | NNQDRPA | HYWDSRSPISWI |
| | SEQ ID NO: | SEQ ID NO: 91 | ELFYYYYMDA | SEQ ID NO: 93 | SEQ ID | SEQ ID NO: 95 |
| | 90 | | SEQ ID NO: 96 | | NO: 94 | |
| 7 | DNYWS | YVHDSGDTNYNPSLKS | TKHGRRIYGVVAFK | GEESLGSRSVI | NNNDRPS | HIWDSRRPTNWV |
| | SEQ ID NO: | SEQ ID NO: 98 | EWFTYFYMDV | SEQ ID NO: 100 | SEQ ID | SEQ ID |
| | 97 | | SEQ ID NO: 99 | | NO: 101 | NO: 102 |
| 8 | DAYWS | YVHHSGDTNYNPSLKR | ALHGKRIYGIVALG | GKESIGSRAVQ | NNQDRPA | HIYDARGGTNWV |
| | SEQ ID NO: | SEQ ID NO: 104 | ELFTYFYMDV | SEQ ID NO: 106 | SEQ ID | SEQ ID |
| | 103 | | SEQ ID NO: 105 | | NO: 94 | NO: 107 |
| 9 | ACTYFWG | SLSHCQSFWGSGWTFH | FDGEVLVYNHWPKP | NGTATNFVS | GVDKRPP | GSLVGNWDVI |
| | SEQ ID NO: | NPSLKS | AWVDL | SEQ ID NO: 111 | SEQ ID | SEQ ID |
| | 108 | SEQ ID NO: 109 | SEQ ID NO: 110 | | NO: 112 | NO: 113 |
| 10 | ACDYFWG | GLSHCAGYYNTGWTYH | FDGEVLVYHDWPKP | TGTSNRFVS | GVNKRPS | SSLVGNWDVI |
| | SEQ ID NO: | NPSLKS | AWVDL | SEQ ID NO: 117 | SEQ ID | SEQ ID |
| | 114 | SEQ ID NO: 115 | SEQ ID NO: 116 | | NO: 118 | NO: 119 |
| 11 | ACDYFWG | SLSHCAGYYNSGWTYH | FGGDVLVYHDWPKP | TGNINNFVS | GVNKRPS | GSLAGNWDVV |
| | SEQ ID NO: | NPSLKS | AWVDL | SEQ ID NO: 122 | SEQ ID | SEQ ID |
| | 114 | SEQ ID NO: 120 | SEQ ID NO: 121 | | NO: 118 | NO: 123 |
| 12 | ACNSFWG | SLSHCASYWNRGWTYH | FGGEVLRYTDWPKP | TGTSNNFVS | DVNKRPS | GSLVGNWDVI |
| | SEQ ID NO: | NPSLKS | AWVDL | SEQ ID NO: 127 | SEQ ID | SEQ ID |
| | 124 | SEQ ID NO: 125 | SEQ ID NO: 126 | | NO: 128 | NO: 113 |
| 13 | GCDYFWG | GLSHCAGYYNTGWTYH | FDGEVLVYNDWPKP | TGTSNNFVS | GVNKRPS | GSLVGNWDVI |
| | SEQ ID NO: | NPSLKS | AWVDL | SEQ ID NO: 127 | SEQ ID | SEQ ID |
| | 129 | SEQ ID NO: 115 | SEQ ID NO: 131 | | NO: 118 | NO: 113 |
| 14 | TGHYYWG | HIHYTTAVLHNPSLKS | SGGDILYYYEWQKP | NGTSSDIGGWNFVS | EVNKRPS | SSLFGRWDVV |
| | SEQ ID NO: | SEQ ID NO: 133 | HWFSP | SEQ ID NO: 135 | SEQ ID | SEQ ID |
| | 132 | | SEQ ID NO: 134 | | NO: 136 | NO: 137 |
| 15 | GTDWGENDFHYG | SIHWRGRTTHYKTSFR | HKYHDIFRVVPVAG | RASQNVKNNLA | DASSRAG | QQYEEWPRT |
| | SEQ ID NO: | S | WFDP | SEQ ID NO: 141 | SEQ ID | SEQ ID |
| | 138 | SEQ ID NO: 139 | SEQ ID NO: 140 | | NO: 142 | NO: 143 |
| 16 | GGEWGDSDYHWG | SIHWRGTTHYNAPFRG | HKYHDIVMVVPIAG | RASQSVKNNLA | DTSSRAS | QQYEEWPRT |
| | SEQ ID NO: | SEQ ID NO: 145 | WFDP | SEQ ID NO: 147 | SEQ ID | SEQ ID |
| | 144 | | SEQ ID NO: 146 | | NO: 148 | NO: 143 |
| 17 | GGEWGDKDYHWG | SIHWRGTTHYKESLRR | HRHHDVFMLVPIAG | RASQNINKNLA | ETYSKIA | QQYEEWPRT |
| | SEQ ID NO: | SEQ ID NO: 150 | WFDV | SEQ ID NO: 152 | SEQ ID | SEQ ID |
| | 149 | | SEQ ID NO: 151 | | NO: 153 | NO: 143 |
| 18 | SDHSWT | DIHYNGATTYNPSLRS | NAIRIYGVVALGEW | SGAPLTSRFTY | RSSQRSS | QSSDTSDSYKM |
| | SEQ ID NO: | SEQ ID NO: 155 | FHYGMDV | SEQ ID NO: 157 | SEQ ID | SEQ ID |
| | 154 | | SEQ ID NO: 156 | | NO: 158 | NO: 159 |
| 19 | DYFIH | WINPKTGQPNNPRQFQ | QRSDYWDFDV | QANGYLN | DGSKLER | QVYEF |
| | SEQ ID NO: | G | SEQ ID NO: 162 | SEQ ID NO: 163 | SEQ ID | SEQ ID |
| | 160 | SEQ ID NO: 161 | | | NO: 164 | NO: 165 |
| 20 | DHFIH | WINPKTGQPNNPRQFQ | QRSDFWDFDV | QANGYLN | DGSKLER | QVYEF |
| | SEQ ID NO: | G | SEQ ID NO: 167 | SEQ ID NO: 163 | SEQ ID | SEQ ID |
| | 166 | SEQ ID NO: 161 | | | NO: 164 | NO: 165 |
| 21 | NCPIN | WMKPRGGAVSYARQLQ | GKYCTARDYYNWDF | RTSQYGSLA | SGSTRAA | QQYEF |
| | SEQ ID NO: | G | EH | SEQ ID NO: 171 | SEQ ID | SEQ ID |
| | 168 | SEQ ID NO: 169 | SEQ ID NO: 170 | | NO: 172 | NO: 173 |
| 22 | NCPIN | WMKPRHGAVSYARQLQ | GKYCTARDYYNWDF | RTSQYGSLA | SGSTRAA | QQYEF |
| | SEQ ID NO: | G | EH | SEQ ID NO: 171 | SEQ ID | SEQ ID |
| | 168 | SEQ ID NO: 174 | SEQ ID NO: 170 | | NO: 172 | NO: 173 |
| 23 | DCTLN | WLKPRGGAVNYARPLQ | GKNCDYNWDFEH | RTSQYGSLA | SGSTRAA | QQYEF |
| | SEQ ID NO: | GSEQ ID NO: 176 | SEQ ID NO: 177 | SEQ ID NO: 171 | SEQ ID | SEQ ID |
| | 175 | | | | NO: 172 | NO: 173 |
| 24 | AHILF | WIKPQYGAVNFGGGFR | DRSYGDSSWALDA | QTSQGVGSDLH | HTSSVED | QVLQF |
| | SEQ ID NO: | DSEQ ID NO: 179 | SEQ ID NO: 180 | SEQ ID NO: 181 | SEQ ID | SEQ ID |
| | 178 | | | | NO: 182 | NO: 183 |
| 25 | DDDTFTKYWTH | VISPHFARPIYSYKFR | DPFGDRAPHYNYHM | RASQGLDSSHLA | GTSNRAR | QRYGGTPIT |
| | SEQ ID NO: | D | DV | SEQ ID NO: 905 | SEQ ID | SEQ ID |
| | 902 | SEQ ID NO: 903 | SEQ ID NO: 904 | | NO: 906 | NO: 907 |
| 26 | RTELIH | WVKTVTGAVNFGSPDF | QKFYTGGQGWYFDL | TAASYGHMT | ATSKRAS | QQLEF |
| | SEQ ID NO: | R | SEQ ID NO: 910 | SEQ ID NO: 911 | SEQ ID | SEQ ID |
| | 908 | SEQ ID NO: 909 | | | NO: 912 | NO: 913 |
| 27 | SGFDFSRQGMH | FIKYDGSEKYHADSVW | EAGGPDYRNGYNYY | NGTSNDVGGYESVS | DVSKRPS | KSLTSTRRRV |
| | SEQ ID NO: | SEQ ID NO: 185 | DFYDGYYNYHYMDV | SEQ ID NO: 187 | G | SEQ ID |
| | 184 | | SEQ ID NO: 186 | | SEQ ID | NO: 189 |
| | | | | | NO: 188 | |
| 28 | SGFTFHKYGMH | LISDDGMRKYHSDSMW | EAGGPIWHDDVKYY | NGTSSDVGGFDSVS | DVSHRPS | SSLTDRSHRI |
| | SEQ ID NO: | SEQ ID NO: 191 | DFNDGYYNYHYMDV | SEQ ID NO: 193 | G | SEQ ID |
| | 190 | | SEQ ID NO: 192 | | SEQ ID | NO: 195 |
| | | | | | NO: 194 | |
| 29 | DYYLH | LIDPENGEARYAEKFQ | GAVGADSGSWFDP | SGSKLGDKYVS | ENDRRPS | QAWETTTTTFV |
| | SEQ ID NO: | G | SEQ ID NO: 198 | SEQ ID NO: 199 | SEQ ID | SEQ ID |
| | 196 | SEQ ID NO: 197 | | | NO: 200 | NO: 201 |
| 30 | SYAFS | MITPVFGETKYAPRFQ | DRRVVPMATDNWLD | RASQTIHTYLN | GASTLQS | QQSYSTPRT |
| | SEQ ID NO: | G | P | SEQ ID NO: 205 | SEQ ID | SEQ ID |
| | 202 | SEQ ID NO: 203 | SEQ ID NO: 204 | | NO: 206 | NO: 207 |
| 31 | NHDVH | WMSHEGDKTGLAQKFQ | GSKHRLRDYFLYNE | KCSHSLQHSTGANY | LATHRAS | MQGLHSPWT |
| | SEQ ID NO: | G | YGPNYEEWGDYLAT | LA | SEQ ID | SEQ ID |
| | 208 | SEQ ID NO: 209 | LDV | SEQ ID NO: 211 | NO: 212 | NO: 213 |
| | | | SEQ ID NO: 210 | | | |
| 32 | KYDVH | WISHERDKTESAQRFK | GSKHRLRDYVLYDD | SSTQSLRHSNGANY | LGSQRAS | MQGLNRPWT |
| | SEQ ID NO: | G | YGLINYQEWNDYLE | LA | SEQ ID | SEQ ID |
| | 214 | SEQ ID NO: 215 | FLDV | SEQ ID NO: 217 | NO: 218 | NO: 219 |
| | | | SEQ ID NO: 216 | | | |
| 33 | KYDVH | WMSHEGDKTESAQRFK | GSKHRLRDYVLYDD | TSTQSLRHSNGANY | LGSQRAS | MQGLNRPWT |
| | SEQ ID NO: | G | YGLINYQEWNDYLE | LA | SEQ ID | SEQ ID |
| | 214 | SEQ ID NO: 220 | FLDV | SEQ ID NO: 221 | NO: 218 | NO: 219 |
| | | | SEQ ID NO: 216 | | | |
| 34 | KYDVH | WMSHEGDKTESAQRFK | GSKHRLRDYVLYDD | TSTQSLRHSNGANY | LGSQRAS | MQGLNRPWT |
| | SEQ ID NO: | G | YGLINQQEWNDYLE | LA | SEQ ID | SEQ ID |
| | 214 | SEQ ID NO: 220 | FLDV | SEQ ID NO: 221 | NO: 218 | NO: 219 |
| | | | SEQ ID NO: 222 | | | |
| 35 | GYGMH | SISHDGIKKYHAEKVW | DLREDECEEWWSDY | SGNTSNIGNNFVS | ETDKRPS | ATWAASLSSARV |
| | SEQ ID NO: | G | YDFGKQLPCAKSRG | SEQ ID NO: 917 | SEQ ID | SEQ ID |
| | 914 | SEQ ID NO: 915 | GLVGIADN | | NO: 918 | NO: 919 |
| | | | SEQ ID NO: 916 | | | |
| 36 | KYPMY | AISGDAWHVVYSNSVQ | MFQESGPPRLDRWS | KSSESLRQSNGKTS | EVSNRFS | MQSKDFPLT |
| | SEQ ID NO: | G | GRNYYYYSGMDV | LY | SEQ ID | SEQ ID |
| | 223 | SEQ ID NO: 224 | SEQ ID NO: 225 | SEQ ID NO: 226 | NO: 227 | NO: 228 |
| 37 | GLYAVN | QIWRWKSSASHHFRG | TSTYDKWSGLHHDG | RASQSITGNWVA | RGAALLG | QQYDTYPGT |
| | SEQ ID NO: | SEQ ID NO: 230 | VMAFSS | SEQ ID NO: 232 | SEQ ID | SEQ ID |
| | 229 | | SEQ ID NO: 231 | | NO: 233 | NO: 234 |
| 38 | NDNYYWA | TIYYSGTTYYNPSLRN | MPSHGFWSTSFSYW | RASQSVTKYLN | GTYTLLS | QQAHSTPWT |
| | SEQ ID NO: | SEQ ID NO: 921 | YFDL | SEQ ID NO: 923 | SEQ ID | SEQ ID |
| | 920 | | SEQ ID NO: 922 | | NO: 924 | NO: 925 |

TABLE D2
CDRs (Chothia) for illustrative anti-HIV antigen binding arm

| Ab | | | | | VL - | |
|---|---|---|---|---|---|---|
| Name | VH - CDR1 | VH - CDR2 | VH - CDR3 | VL - CDR1 | CDR2 | VL - CDR3 |
| 39 | GASISD | KSG | LHGRRIYGIVAFNEWFT | EKSLGSRA | NNQ | WDSRVPTKW |
| | SEQ ID | SEQ ID NO: | YFYMD | SEQ ID | SEQ ID | SEQ ID |
| | NO: 235 | 236 | SEQ ID NO: 237 | NO: 238 | NO: 239 | NO: 240 |
| 40 | GDSMNNY | DRE | RRGQRIYGVVSFGEFFY | RQALGSRA | NNQ | WDSRSGFSW |
| | SEQ ID | SEQ ID NO: | YYSMD | SEQ ID | SEQ ID | SEQ ID |
| | NO: 241 | 242 | SEQ ID NO: 243 | NO: 244 | NO: 239 | NO: 245 |
| 41 | GGSISNY | DRE | RRGQRIYGVVSFGEFFY | RQALGSRA | NNQ | WDSRSGFSW |
| | SEQ ID | SEQ ID NO: | YYYMD | SEQ ID | SEQ ID | SEQ ID |
| | NO: 246 | 242 | SEQ ID NO: 247 | NO: 244 | NO: 239 | NO: 245 |
| 42 | NGSVSGR | DTD | QQGKRIYGIVSFGEFFY | ERSRGSRA | NNQ | WDSRSPISW |
| | SEQ ID | SEQ ID NO: | YYYMD | SEQ ID | SEQ ID | SEQ ID |
| | NO: 248 | 249 | SEQ ID NO: 250 | NO: 251 | NO: 239 | NO: 252 |
| 43 | NGSVSGR | DTD | QQGKRIYGIVSFGELFY | ERSRGSRA | NNQ | WDSRSPISW |
| | SEQ ID | SEQ ID NO: | YYYMD | SEQ ID | SEQ ID | SEQ ID 2 |
| | NO: 248 | 249 | SEQ ID NO: 253 | NO: 251 | NO: 239 | NO: 25 |
| 44 | GTLVRDN | DSG | KHGRRIYGVVAFKEWFT | EESLGSRS | NNN | WDSRRPTNW |
| | SEQ ID | SEQ ID NO: | YFYMD | SEQ ID | SEQ ID | SEQ ID |
| | NO: 254 | 255 | SEQ ID NO: 256 | NO: 257 | NO: 258 | NO: 259 |
| 45 | GASINDA | HSG | LHGKRIYGIVALGELFT | KESIGSRA | NNQ | YDARGGTNW |
| | SEQ ID | SEQ ID NO: | YFYMD | SEQ ID | SEQ ID | SEQ ID |
| | NO: 260 | 261 | SEQ ID NO: 262 | NO: 263 | NO: 239 | NO: 264 |
| 46 | GESTGACTY | HCQSFWGSG | DGEVLVYNHWPKPAWVD | GTATNF | GVD | LVGNWDV |
| | SEQ ID | SEQ ID NO: | SEQ ID NO: 267 | SEQ ID | SEQ ID | SEQ ID |
| | NO: 265 | 266 | | NO: 268 | NO: 269 | NO: 270 |
| 47 | GDSTAACDY | HCAGYYNTG | DGEVLVYHDWPKPAWVD | GTSNRF | GVN | LVGNWDV |
| | SEQ ID | SEQ ID NO: | SEQ ID NO: 273 | SEQ ID | SEQ ID | SEQ ID |
| | NO: 271 | 272 | | NO: 274 | NO: 275 | NO: 270 |
| 48 | GDSTAACDY | HCAGYYNSG | GGDVLVYHDWPKPAWVD | GNINNF | GVN | LAGNWDV |
| | SEQ ID | SEQ ID NO: | SEQ ID NO: 277 | SEQ ID | SEQ ID | SEQ ID |
| | NO: 271 | 276 | | NO: 278 | NO: 275 | NO: 279 |
| 49 | GDSTAACNS | HCASYWNRG | GGEVLRYTDWPKPAWVD | GTSNNF | DVN | LVGNWDV |
| | SEQ ID | SEQ ID NO: | SEQ ID NO: 282 | SEQ ID | SEQ ID | SEQ ID |
| | NO: 280 | 281 | | NO: 283 | NO: 284 | NO: 270 |
| 50 | GDSTAGCDY | HCAGYYNTG | DGEVLVYNDWPKPAWVD | GTSNNF | GVN | LVGNWDV |
| | SEQ ID | SEQ ID NO: | SEQ ID NO: 286 | SEQ ID | SEQ ID | SEQ ID |
| | NO: 285 | 272 | | NO: 283 | NO: 275 | NO: 270 |
| 51 | GESINTGHY | YTT | GGDILYYYEWQKPHWFS | GTSSDIGGWNF | EVN | LFGRWDV |
| | SEQ ID | SEQ ID NO: | SEQ ID NO: 289 | SEQ ID | SEQ ID | SEQ ID |
| | NO: 287 | 288 | | NO: 290 | NO: 291 | NO: 292 |
| 52 | GGSMRGTDW | WRGR | KYHDIFRVVPVAGWFD | SQNVKNN | DAS | YEEWPR |
| | GENDF | SEQ ID NO: | SEQ ID NO: 295 | SEQ ID | SEQ ID | SEQ ID |
| | SEQ ID | 294 | | NO: 296 | NO: 297 | NO: 298 |
| | NO: 293 | | | | | |
| 53 | GGSIRGGEW | WRG | KYHDIVMVVPIAGWFD | SQSVKNN | DTS | YEEWPR |
| | GDSDY | SEQ ID NO: | SEQ ID NO: 301 | SEQ ID | SEQ ID | SEQ ID |
| | SEQ ID | 300 | | NO: 302 | NO: 303 | NO: 298 |
| | NO: 299 | | | | | |
| 54 | GDSIRGGEW | WRG | RHHDVFMLVPIAGWFD | SQNINKN | ETY | YEEWPR |
| | GDKDY | SEQ ID NO: | SEQ ID NO: 305 | SEQ ID | SEQ ID | SEQ ID |
| | SEQ ID | 300 | | NO: 306 | NO: 307 | NO: 298 |
| | NO: 304 | | | | | |
| 55 | QDSRPSDH | YNG | AIRIYGVVALGEWFHYG | GAPLTSRF | RSS | SDTSDSYK |
| | SEQ ID | SEQ ID NO: | MD | SEQ ID | SEQ ID | SEQ ID |
| | NO: 308 | 309 | SEQ ID NO: 310 | NO: 311 | NO: 312 | NO: 313 |
| 56 | GYNIRDY | PKTG | RSDYWDFD | NGY | DGS | YE |
| | SEQ ID | SEQ ID NO: | SEQ ID NO: 316 | SEQ ID | SEQ ID | SEQ ID |
| | NO: 314 | 315 | | NO: 317 | NO: 318 | NO: 327 |
| 57 | GYKISDH | PKTG | RSDFWDFD | NGY | DGS | YE |
| | SEQ ID | SEQ ID NO: | SEQ ID NO: 321 | SEQ ID | SEQ ID | SEQ ID |
| | NO: 320 | 315 | | NO: 317 | NO: 318 | NO: 327 |
| 58 | GYEFINC | PRGG | KYCTARDYYNWDFE | SQYGS | SGS | YE |
| | SEQ ID | SEQ ID NO: | SEQ ID NO: 324 | SEQ ID | SEQ ID | SEQ ID |
| | NO: 322 | 323 | | NO: 325 | NO: 326 | NO: 327 |
| 59 | GYEFINC | PRHG | KYCTARDYYNWDFE | SQYGS | SGS | YE |
| | SEQ ID | SEQ ID NO: | SEQ ID NO: 324 | SEQ ID | SEQ ID | SEQ ID |
| | NO: 322 | 328 | | NO: 325 | NO: 326 | NO: 327 |
| 60 | GYEFIDC | PRGG | KNCDYNWDFE | SQYGS | SGS | YE |
| | SEQ ID | SEQ ID NO: | SEQ ID NO: 330 | SEQ ID | SEQ ID | SEQ ID |
| | NO: 329 | 323 | | NO: 325 | NO: 326 | NO: 327 |
| 61 | GYTFTAH | PQYG | RSYGDSSWALD | SQGVGSD | HTS | LQ |
| | SEQ ID | SEQ ID NO: | SEQ ID NO: 333 | SEQ ID | SEQ ID | SEQ ID |
| | NO: 331 | 332 | | NO: 334 | NO: 335 | NO: 336 |
| 62 | DDPYTDDDT | PHFA | PFGDRAPHYNYHMD | SQGLDSSH | GTS | YGGTPI |
| | FTKY | SEQ ID NO: | SEQ ID NO: 928 | SEQ ID | SEQ ID | SEQ ID |
| | SEQ ID | 927 | | NO: 929 | NO: 930 | NO: 931 |
| | NO: 926 | | | | | |
| 63 | EDIFERTE | TVTG | KFYTGGQGWYFD | ASYGH | ATS | LE |
| | SEQ ID | SEQ ID NO: | SEQ ID NO: 934 | SEQ ID | SEQ ID | SEQ ID |
| | NO: 932 | 933 | | NO: 935 | NO: 936 | NO: 937 |
| 64 | GFDFSRQ | YDGS | AGGPDYRNGYNYYDFYD | GTSNDVGGYES | DVS | LTSTRRR |
| | SEQ ID | SEQ ID NO: | GYYNYHYMD | SEQ ID | SEQ ID | SEQ ID |
| | NO: 337 | 338 | SEQ ID NO: 339 | NO: 340 | NO: 341 | NO: 342 |
| 65 | GFTFHKY | DDGM | AGGPIWHDDVKYYDFND | GTSSDVGGFDS | DVS | LTDRSHR |
| | SEQ ID | SEQ ID NO: | GYYNYHYMD | SEQ ID | SEQ ID | SEQ ID |
| | NO: 343 | 344 | SEQ ID NO: 345 | NO: 346 | NO: 341 | NO: 347 |
| 66 | GYSFIDY | PENG | AVGADSGSWFD | GSKLGDKY | END | WETTTTTF |
| | SEQ ID | SEQ ID NO: | SEQ ID NO: 350 | SEQ ID | SEQ ID | SEQ ID |
| | NO: 348 | 349 | | NO: 351 | NO: 352 | NO: 353 |
| 67 | GGAFSSY | PVFG | RRVVPMATDNWLD | SQTIHTY | GAS | SYSTPR |
| | SEQ ID | SEQ ID NO: | SEQ ID NO: 356 | SEQ ID | SEQ ID | SEQ ID |
| | NO: 354 | 355 | | NO: 357 | NO: 358 | NO: 359 |
| 68 | GNSFSNH | HEGD | SKHRLRDYFLYNEYGPN | SHSLQHSTGANY | LAT | GLHSPW |
| | SEQ ID | SEQ ID NO: | YEEWGDYLATLD | SEQ ID | SEQ ID | SEQ ID |
| | NO: 360 | 361 | SEQ ID NO: 362 | NO: 363 | NO: 364 | NO: 365 |
| 69 | GNTFSKY | HERD | SKHRLRDYVLYDDYGLI | TQSLRHSNGANY | LGS | GLNRPW |
| | SEQ ID | SEQ ID NO: | NYQEWNDYLEFLD | SEQ ID | SEQ ID | SEQ ID |
| | NO: 366 | 367 | SEQ ID NO: 368 | NO: 369 | NO: 370 | NO: 371 |
| 70 | GNTFSKY | HEGD | SKHRLRDYVLYDDYGLI | TQSLRHSNGANY | LGS | GLNRPW |
| | SEQ ID | SEQ ID NO: | NYQEWNDYLEFLD | SEQ ID | SEQ ID | SEQ ID |
| | NO: 366 | 361 | SEQ ID NO: 368 | NO: 369 | NO: 370 | NO: 371 |
| 71 | GNTFRKY | HEGD | SKHRLRDYVLYDDYGLI | TQSLRHSNGANY | LGS | GLNRPW |
| | SEQ ID | SEQ ID NO: | NQQEWNDYLEFLD | SEQ ID | SEQ ID | SEQ ID |
| | NO: 372 | 361 | SEQ ID NO: 373 | NO: 369 | NO: 370 | NO: 371 |
| 72 | QFRFDGY | HDGI | LREDECEEWWSDYYDFG | GNTSNIGNNF | ETD | WAASLSSAR |
| | SEQ ID | SEQ ID NO: | KQLPCAKSRGGLVGIAD | SEQ ID | SEQ ID | SEQ ID |
| | NO: 938 | 939 | SEQ ID NO: 940 | NO: 941 | NO: 942 | NO: 943 |
| 73 | DFPFSKY | GDAW | FQESGPPRLDRWSGRNY | SESLRQSNGKTS | EVS | SKDFPL |
| | SEQ ID | SEQ ID NO: | YYYSGMD | SEQ ID | SEQ ID | SEQ ID |
| | NO: 374 | 375 | SEQ ID NO: 376 | NO: 377 | NO: 378 | NO: 379 |
| 74 | GVNTFGLY | RW | STYDKWSGLHHDGVMAF | SQSITGNW | RGA | YDTYPG |
| | SEQ ID | SEQ ID NO: | S | SEQ ID | SEQ ID | SEQ ID |
| | NO: 380 | 381 | SEQ ID NO: 382 | NO: 383 | NO: 384 | NO: 385 |
| 75 | GDSVSNDNY | YSG | PSHGFWSTSFSYWYFD | SQSVTKY | GTY | AHSTPW |
| | SEQ ID | SEQ ID NO: | SEQ ID NO: 946 | SEQ ID | SEQ ID | SEQ ID |
| | NO: 944 | 945 | | NO: 947 | NO: 948 | NO: 949 |

TABLE D3
CDRs (IMGT) for illustrative anti-HIV antigen binding arm

| Ab | | | | | | |
|---|---|---|---|---|---|---|
| Name | VH - CDR1 | VH - CDR2 | VH - CDR3 | VL - CDR1 | VL - CDR2 | VL - CDR3 |
| 76 | GASISDSY | VHKSGDT | ARTLHGRRIYGIVAFNEWFTYFYMDV | SLGSRA | NNQ | HIWDSRVPTKWV |
| | SEQ ID | SEQ ID NO: 387 | SEQ ID NO: 388 | SEQ ID | SEQ ID | SEQ ID NO: 81 |
| | NO: 386 | | | NO: 389 | NO: 239 | |
| 77 | GDSMNNYY | ISDRESA | ATARRGQRIYGVVSFGEFFYYYSMDV | ALGSRA | NNQ | HMWDSRSGFSWS |
| | SEQ ID | SEQ ID NO: 391 | SEQ ID NO: 392 | SEQ ID | SEQ ID | SEQ ID NO: 87 |
| | NO: 390 | | | NO: 393 | NO: 239 | |
| 78 | GDSMNNYY | ISDRESA | ARARRGQRIYGVVSFGEFFYYYSMDV | ALGSRA | NNQ | HMWDSRSGFSWS |
| | SEQ ID | SEQ ID NO: 391 | SEQ ID NO: 394 | SEQ ID | SEQ ID | SEQ ID NO: 87 |
| | NO: 390 | | | NO: 393 | NO: 239 | |
| 79 | GGSISNYY | ISDRETT | ATARRGQRIYGVVSFGEFFYYYYMDV | ALGSRA | NNQ | HMWDSRSGFSWS |
| | SEQ ID | SEQ ID NO: 396 | SEQ ID NO: 397 | SEQ ID | SEQ ID | SEQ ID NO: 87 |
| | NO: 395 | | | NO: 393 | NO: 239 | |
| 80 | NGSVSGRF | FSDTDRS | ARAQQGKRIYGIVSFGELFYYYYMDA | SRGSRA | NNQ | HYWDSRSPISWI |
| | SEQ ID | SEQ ID NO: 399 | SEQ ID NO: 400 | SEQ ID | SEQ ID | SEQ ID NO: 95 |
| | NO: 398 | | | NO: 401 | NO: 239 | |
| 81 | NGSVSGRF | FSDTDRS | ARAQQGKRIYGIVSFGEFFYYYYMDA | SRGSRA | NNQ | HYWDSRSPISWI |
| | SEQ ID | SEQ ID NO: 399 | SEQ ID NO: 402 | SEQ ID | SEQ ID | SEQ ID NO: 95 |
| | NO: 398 | | | NO: 401 | NO: 239 | |
| 82 | GASINDAY | VHHSGDT | ARALHGKRIYGIVALGELFTYFYMDV | SLGSRS | NNN | HIWDSRRPTNWV |
| | SEQ ID | SEQ ID NO: 404 | SEQ ID NO: 405 | SEQ ID | SEQ ID | SEQ ID |
| | NO: 403 | | | NO: 406 | NO: 258 | NO: 102 |
| 83 | GTLVRDNY | VHDSGDT | ATTKHGRRIYGVVAFKEWFTYFYMDV | SIGSRA | NNQ | HIYDARGGTNWV |
| | SEQ ID | SEQ ID NO: 408 | SEQ ID NO: 409 | SEQ ID | SEQ ID | SEQ ID |
| | NO: 407 | | | NO: 410 | NO: 239 | NO: 107 |
| 84 | GESTGACTYF | LSHCQSFWGSGWT | ARFDGEVLVYNHWPKPAWVDL | ATNF | GVD | GSLVGNWDVI |
| | SEQ ID | SEQ ID NO: 412 | SEQ ID NO: 413 | SEQ ID | SEQ ID | SEQ ID |
| | NO: 411 | | | NO: 414 | NO: 269 | NO: 113 |
| 85 | GDSTAACDYF | LSHCAGYYNTGWT | ARFDGEVLVYHDWPKPAWVDL | SNRF | GVN | SSLVGNWDVI |
| | SEQ ID | SEQ ID NO: 416 | SEQ ID NO: 417 | SEQ ID | SEQ ID | SEQ ID |
| | NO: 415 | | | NO: 418 | NO: 275 | NO: 119 |
| 86 | GDSTAACDYF | LSHCAGYYNSGWT | ARFGGDVLVYHDWPKPAWVDL | INNF | GVN | GSLAGNWDVV |
| | SEQ ID | SEQ ID NO: 419 | SEQ ID NO: 420 | SEQ ID | SEQ ID | SEQ ID |
| | NO: 415 | | | NO: 421 | NO: 275 | NO: 123 |
| 87 | GDSTAACNSF | LSHCASYWNRGWT | ARFGGEVLRYTDWPKPAWVDL | SNNF | DVN | GSLVGNWDVI |
| | SEQ ID | SEQ ID NO: 423 | SEQ ID NO: 424 | SEQ ID | SEQ ID | SEQ ID |
| | NO: 422 | | | NO: 425 | NO: 284 | NO: 113 |
| 88 | GDSTAGCDYF | LSHCAGYYNTGWT | ARFDGEVLVYNDWPKPAWVDL | SNNF | GVN | GSLVGNWDVI |
| | SEQ ID | SEQ ID NO: 416 | SEQ ID NO: 427 | SEQ ID | SEQ ID | SEQ ID |
| | NO: 426 | | | NO: 425 | NO: 275 | NO: 113 |
| 89 | GESINTGHYY | IHYTTAV | VRSGGDILYYYEWQKPHWFSP | SSDIGGWNF | EVN | SSLFGRWDVV |
| | SEQ ID | SEQ ID NO: 429 | SEQ ID NO: 430 | SEQ ID | SEQ ID | SEQ ID |
| | NO: 428 | | | NO: 431 | NO: 291 | NO: 137 |
| 90 | GGSMRGTDWG | IHWRGRTT | ARHKYHDIFRVVPVAGWFDP | QNVKNN | DAS | QQYEEWPRT |
| | ENDFH | SEQ ID NO: 433 | SEQ ID NO: 434 | SEQ ID | SEQ ID | SEQ ID |
| | SEQ ID | | | NO: 435 | NO: 297 | NO: 143 |
| | NO: 432 | | | | | |
| 91 | GGSIRGGEWG | IHWRGTT | VKHKYHDIVMVVPIAGWFDP | QSVKNN | DTS | QQYEEWPRT |
| | DSDYH | SEQ ID NO: 437 | SEQ ID NO: 438 | SEQ ID | SEQ ID | SEQ ID |
| | SEQ ID | | | NO: 439 | NO: 303 | NO: 143 |
| | NO: 436 | | | | | |
| 92 | GDSIRGGEWG | IHWRGTT | ARHRHHDVFMLVPIAGWFDV | QNINKN | ETY | QQYEEWPRT |
| | DKDYH | SEQ ID NO: 437 | SEQ ID NO: 441 | SEQ ID | SEQ ID | SEQ ID |
| | SEQ ID | | | NO: 442 | NO: 307 | NO: 143 |
| | NO: 440 | | | | | |
| 93 | QDSRPSDHS | IHYNGAT | NAIRIYGVVALGEWFHYGMDV | PLTSRF | RSS | QSSDTSDSYKM |
| | SEQ ID | SEQ ID NO: 444 | SEQ ID NO: 445 | SEQ ID | SEQ ID | SEQ ID |
| | NO: 443 | | | NO: 446 | NO: 312 | NO: 159 |
| 94 | GYNIRDYF | INPKTGQP | ARQRSDYWDFDV | NGY | DGS | QVYEF |
| | SEQ ID | SEQ ID NO: 448 | SEQ ID NO: 449 | SEQ ID | SEQ ID | SEQ ID |
| | NO: 447 | | | NO: 450 | NO: 318 | NO: 165 |
| 95 | GYKISDHF | INPKTGQP | ARQRSDFWDFDV | NGY | DGS | QVYEF |
| | SEQ ID | SEQ ID NO: 448 | SEQ ID NO: 452 | SEQ ID | SEQ ID | SEQ ID |
| | NO: 451 | | | NO: 450 | NO: 318 | NO: 165 |
| 96 | GYEFINCP | MKPRGGAV | TRGKYCTARDYYNWDFEH | QYGS | SGS | QQYEF |
| | SEQ ID | SEQ ID NO: 454 | SEQ ID NO: 455 | SEQ ID | SEQ ID | SEQ ID |
| | NO: 453 | | | NO: 456 | NO: 326 | NO: 173 |
| 97 | GYEFINCP | MKPRHGAV | TRGKYCTARDYYNWDFEH | QYGS | SGS | QQYEF |
| | SEQ ID | SEQ ID NO: 457 | SEQ ID NO: 455 | SEQ ID | SEQ ID | SEQ ID |
| | NO: 453 | | | NO: 456 | NO: 326 | NO: 173 |
| 98 | GYEFIDCT | LKPRGGAV | TRGKNCDYNWDFEH | QYGS | SGS | QQYEF |
| | SEQ ID | SEQ ID NO: 459 | SEQ ID NO: 460 | SEQ ID | SEQ ID | SEQ ID |
| | NO: 458 | | | NO: 456 | NO: 326 | NO: 173 |
| 99 | GYTFTAHI | IKPQYGAV | ARDRSYGDSSWALDA | QGVGSD | HTS | QVLQF |
| | SEQ ID | SEQ ID NO: 462 | SEQ ID NO: 463 | SEQ ID | SEQ ID | SEQ ID |
| | NO: 461 | | | NO: 464 | NO: 335 | NO: 183 |
| 100 | DDPYTDDDTF | ISPHFARP | ARDPFGDRAPHYNYHMDV | QGLDSSH | GTS | QRYGGTPIT |
| | TKYW | SEQ ID NO: 951 | SEQ ID NO: 952 | SEQ ID | SEQ ID | SEQ ID |
| | SEQ ID | | | NO: 953 | NO: 930 | NO: 907 |
| | NO: 950 | | | | | |
| 101 | EDIFERTEL | VKTVTGAV | ARQKFYTGGQGWYFDL | SYGH | ATS | QQLEF |
| | SEQ ID | SEQ ID NO: 955 | SEQ ID NO: 956 | SEQ ID | SEQ ID | SEQ ID |
| | NO: 954 | | | NO: 957 | NO: 936 | NO: 913 |
| 102 | GFDFSRQG | IKYDGSEK | VREAGGPDYRNGYNYYDFYDGYYNYH | SNDVGGYES | DVS | KSLTSTRRRV |
| | SEQ ID | SEQ ID NO: 466 | YMDV | SEQ ID | SEQ ID | SEQ ID |
| | NO: 465 | | SEQ ID NO: 467 | NO: 468 | NO: 341 | NO: 189 |
| 103 | GFTFHKYG | ISDDGMRK | AREAGGPIWHDDVKYYDFNDGYYNYH | SSDVGGFDS | DVS | SSLTDRSHRI |
| | SEQ ID | SEQ ID NO: 470 | YMDV | SEQ ID | SEQ ID | SEQ ID |
| | NO: 469 | | SEQ ID NO: 471 | NO: 472 | NO: 341 | NO: 195 |
| 104 | GYSFIDYY | IDPENGEA | AAGAVGADSGSWFDP | KLGDKY | END | QAWETTTTTFV |
| | SEQ ID | SEQ ID NO: 474 | SEQ ID NO: 475 | SEQ ID | SEQ ID | SEQ ID |
| | NO: 473 | | | NO: 476 | NO: 352 | NO: 201 |
| 105 | GGAFSSYA | ITPVFGET | TRDRRVVPMATDNWLDP | QTIHTY | GAS | QQSYSTPRT |
| | SEQ ID | SEQ ID NO: 478 | SEQ ID NO: 479 | SEQ ID | SEQ ID | SEQ ID |
| | NO: 477 | | | NO: 480 | NO: 358 | NO: 207 |
| 106 | GNSFSNHD | MSHEGDKT | LTGSKHRLRDYFLYNEYGPNYEEWGD | HSLQHSTGAN | LAT | MQGLHSPWT |
| | SEQ ID | SEQ ID NO: 482 | YLATLDV | Y | SEQ ID | SEQ ID |
| | NO: 481 | | SEQ ID NO: 483 | SEQ ID | NO: 364 | NO: 213 |
| | | | | NO: 484 | | |
| 107 | GNTFSKYD | ISHERDKT | TRGSKHRLRDYVLYDDYGLINYQEWN | QSLRHSNGAN | LGS | MQGLNRPWT |
| | SEQ ID | SEQ ID NO: 486 | DYLEFLDV | Y | SEQ ID | SEQ ID |
| | NO: 485 | | SEQ ID NO: 487 | SEQ ID | NO: 370 | NO: 219 |
| | | | | NO: 488 | | |
| 108 | GNTFSKYD | MSHEGDKT | TRGSKHRLRDYVLYDDYGLINYQEWN | QSLRHSNGAN | LGS | MQGLNRPWT |
| | SEQ ID | SEQ ID NO: 482 | DYLEFLDV | Y | SEQ ID | SEQ ID |
| | NO: 485 | | SEQ ID NO: 487 | SEQ ID | NO: 370 | NO: 219 |
| | | | | NO: 488 | | |
| 109 | GNTFRKYD | MSHEGDKT | TGGSKHRLRDYVLYDDYGLINQQEWN | QSLRHSNGAN | LGS | MQGLNRPWT |
| | SEQ ID | SEQ ID NO: 482 | DYLEFLDV | Y | SEQ ID | SEQ ID |
| | NO: 489 | | SEQ ID NO: 490 | SEQ ID | NO: 370 | NO: 219 |
| | | | | NO: 488 | | |
| 110 | QFRFDGYG | ISHDGIKK | AKDLREDECEEWWSDYYDFGKQLPCA | TSNIGNNF | ETD | ATWAASLSSARV |
| | SEQ ID | SEQ ID NO: 959 | KSRGGLVGIADN | SEQ ID | SEQ ID | SEQ ID |
| | NO: 958 | | SEQ ID NO: 960 | NO: 961 | NO: 942 | NO: 919 |
| 111 | DFPFSKYP | ISGDAWHV | ARMFQESGPPRLDRWSGRNYYYYSGM | ESLRQSNGKT | EVS | MQSKDFPLT |
| | SEQ ID | SEQ ID NO: 492 | DV | S | SEQ ID | SEQ ID |
| | NO: 491 | | SEQ ID NO: 493 | SEQ ID | NO: 378 | NO: 228 |
| | | | | NO: 494 | | |
| 112 | GVNTFGLYA | IWRWKS | TTTSTYDKWSGLHHDGVMAFSS | QSITGNW | RGA | QQYDTYPGT |
| | SEQ ID | SEQ ID NO: 496 | SEQ ID NO: 497 | SEQ ID | SEQ ID | SEQ ID |
| | NO: 495 | | | NO: 498 | NO: 384 | NO: 234 |
| 113 | GDSVSNDNYY | IYYSGTT | VRMPSHGFWSTSFSYWYFDL | QSVTKY | GTY | QQAHSTPWT |
| | SEQ ID | SEQ ID NO: 963 | SEQ ID NO: 964 | SEQ ID | SEQ ID | SEQ ID |
| | NO: 962 | | | NO: 965 | NO: 948 | NO: 925 |

TABLE D4
CDRs (Honegger) for illustrative anti-HIV antigen binding arm

| Ab | | | | | | |
|---|---|---|---|---|---|---|
| Name | VH - CDR1 | VH - CDR2 | VH - CDR3 | VL - CDR1 | VL - CDR2 | VL - CDR3 |
| 114 | VSGASISDSY | VHKSGDTNYSPSLKSR | TLHGRRIYGIVAF | EKSLGSRA | NNQDRPSGIPER | WDSRVPTKW |
| | SEQ ID NO: 499 | SEQ ID NO: 500 | NEWFTYFYMD | SEQ ID | SEQ ID NO: 502 | SEQ ID |
| | | | SEQ ID NO: 501 | NO: 238 | | NO: 240 |
| 115 | VSGASISDSY | VHKSGDTNYNPSLKSR | TLHGRRIYGIVAF | EKSLGSRA | NNQDRPSGIPER | WDSRVPTKW |
| | SEQ ID NO: 499 | SEQ ID NO: 503 | NEWFTYFYMD | SEQ ID | SEQ ID NO: 502 | SEQ ID |
| | | | SEQ ID NO: 501 | NO: 238 | | NO: 240 |
| 116 | VSGDSMNNYY | ISDRESATYNPSLNSR | ARRGQRIYGVVSF | RQALGSRA | NNQDRPSGIPER | WDSRSGFSW |
| | SEQ ID NO: 505 | SEQ ID NO: 506 | GEFFYYYSMD | SEQ ID | SEQ ID NO: 502 | SEQ ID |
| | | | SEQ ID NO: 507 | NO: 244 | | NO: 245 |
| 117 | VSGGSISNYY | ISDRETTTYNPSLNSR | ARRGQRIYGVVSF | RQALGSRA | NNQDRPSGIPER | WDSRSGFSW |
| | SEQ ID NO: 508 | SEQ ID NO: 509 | GEFFYYYYMD | SEQ ID | SEQ ID NO: 502 | SEQ ID |
| | | | SEQ ID NO: 510 | NO: 244 | | NO: 245 |
| 118 | VSNGSVSGRF | FSDTDRSEYNPSLRSR | AQQGKRIYGIVSF | ERSRGSRA | NNQDRPAGVSER | WDSRSPISW |
| | SEQ ID NO: 511 | SEQ ID NO: 512 | GELFYYYYMD | SEQ ID | SEQ ID NO: 514 | SEQ ID |
| | | | SEQ ID NO: 513 | NO: 251 | | NO: 252 |
| 119 | VSNGSVSGRF | FSDTDRSEYNPSLRSR | AQQGKRIYGIVSF | ERSRGSRA | NNQDRPAGVSER | WDSRSPISW |
| | SEQ ID NO: 511 | SEQ ID NO: 512 | GEFFYYYYMD | SEQ ID | SEQ ID NO: 514 | SEQ ID |
| | | | SEQ ID NO: 515 | NO: 251 | | NO: 252 |
| 120 | VSGTLVRDNY | VHDSGDTNYNPSLKSR | TKHGRRIYGVVAF | EESLGSRS | NNNDRPSGIPDR | WDSRRPTNW |
| | SEQ ID NO: 516 | SEQ ID NO: 517 | KEWFTYFYMD | SEQ ID | SEQ ID NO: 519 | SEQ ID |
| | | | SEQ ID NO: 518 | NO: 257 | | NO: 259 |
| 121 | VSGASINDAY | VHHSGDTNYNPSLKRR | ALHGKRIYGIVAL | KESIGSRA | NNQDRPAGVPER | YDARGGTNW |
| | SEQ ID NO: 520 | SEQ ID NO: 521 | GELFTYFYMD | SEQ ID | SEQ ID NO: 523 | SEQ ID |
| | | | SEQ ID NO: 522 | NO: 263 | | NO: 264 |
| 122 | VSGESTGACTYF | LSHCQSFWGSGWTFHNP | FDGEVLVYNHWPK | GTATNF | GVDKRPPGVPDR | LVGNWDV |
| | SEQ ID NO: 524 | SLKSR | PAWVD | SEQ ID | SEQ ID NO: 527 | SEQ ID |
| | | SEQ ID NO: 525 | SEQ ID NO: 526 | NO: 268 | | NO: 270 |
| 123 | VSGDSTAACDYF | LSHCAGYYNTGWTYHNP | FDGEVLVYHDWPK | GTSNRF | GVNKRPSGVPDR | LVGNWDV |
| | SEQ ID NO: 528 | SLKSR | PAWVD | SEQ ID | SEQ ID NO: 531 | SEQ ID |
| | | SEQ ID NO: 529 | SEQ ID NO: 530 | NO: 274 | | NO: 270 |
| 124 | VSGDSTAACDYF | LSHCAGYYNSGWTYHNP | FGGDVLVYHDWPK | GNINNF | GVNKRPSGVPDR | LAGNWDV |
| | SEQ ID NO: 528 | SLKSR | PAWVD | SEQ ID | SEQ ID NO: 531 | SEQ ID |
| | | SEQ ID NO: 532 | SEQ ID NO: 533 | NO: 278 | | NO: 279 |
| 125 | VSGDSTAACNSF | LSHCASYWNRGWTYHNP | FGGEVLRYTDWPK | GTSNNF | DVNKRPSGVPDR | LVGNWDV |
| | SEQ ID NO: 534 | SLKSR | PAWVD | SEQ ID | SEQ ID NO: 537 | SEQ ID |
| | | SEQ ID NO: 535 | SEQ ID NO: 536 | NO: 283 | | NO: 270 |
| 126 | VSGDSTAGCDYF | LSHCAGYYNTGWTYHNP | FDGEVLVYNDWPK | GTSNNF | GVNKRPSGVPDR | LVGNWDV |
| | SEQ ID | SLKSR | PAWVD | SEQ ID | SEQ ID NO: 531 | SEQ ID |
| | NO: 1090 | SEQ ID NO: 529 | SEQ ID NO: 538 | NO: 283 | | NO: 270 |
| 127 | VSGESINTGHYY | IHYTTAVLHNPSLKSR | SGGDILYYYEWQK | GTSSDIGGWNF | EVNKRPSGVPGR | LFGRWDV |
| | SEQ ID NO: 539 | SEQ ID NO: 540 | PHWFS | SEQ ID | SEQ ID NO: 542 | SEQ ID |
| | | | SEQ ID NO: 541 | NO: 290 | | NO: 292 |
| 128 | VSGGSMRGTDWGE | IHWRGRTTHYKTSFRSR | HKYHDIFRVVPVA | ASQNVKNN | DASSRAGGIPDR | YEEWPR |
| | NDFH | SEQ ID NO: 544 | GWFD | SEQ ID | SEQ ID NO: 547 | SEQ ID |
| | SEQ ID NO: 543 | | SEQ ID NO: 545 | NO: 546 | | NO: 298 |
| 129 | ASGGSIRGGEWGD | IHWRGTTHYNAPFRGR | HKYHDIVMVVPIA | ASQSVKNN | DTSSRASGIPAR | YEEWPR |
| | SDYH | SEQ ID NO: 549 | GWFD | SEQ ID | SEQ ID NO: 551 | SEQ ID |
| | SEQ ID NO: 548 | | SEQ ID NO: 550 | NO: 1091 | | NO: 298 |
| 130 | VSGDSIRGGEWGD | IHWRGTTHYKESLRRR | HRHHDVFMLVPIA | ASQNINKN | ETYSKIAAFPAR | YEEWPR |
| | KDYH | SEQ ID NO: 553 | GWFD | SEQ ID | SEQ ID NO: 556 | SEQ ID |
| | SEQ ID NO: 552 | | SEQ ID NO: 554 | NO: 555 | | NO: 298 |
| 131 | VSQDSRPSDHS | IHYNGATTYNPSLRSR | NAIRIYGVVALGE | GAPLTSRF | RSSQRSSGWSGR | SDTSDSYK |
| | SEQ ID NO: 557 | SEQ ID NO: 558 | WFHYGMD | SEQ ID | SEQ ID NO: 560 | SEQ ID |
| | | | SEQ ID NO: 559 | NO: 311 | | NO: 313 |
| 132 | ASGYNIRDYF | INPKTGQPNNPRQFQGR | QRSDYWDFD | ANGY | DGSKLERGVPSRF | YE |
| | SEQ ID NO: 561 | SEQ ID NO: 562 | SEQ ID NO: 563 | SEQ ID | SEQ ID NO: 565 | SEQ ID |
| | | | | NO: 564 | | NO: 327 |
| 133 | ASGYKISDHF | INPKTGQPNNPRQFQGR | QRSDFWDFD | ANGY | DGSKLERGVPAR | YE |
| | SEQ ID NO: 566 | SEQ ID NO: 562 | SEQ ID | SEQ ID | SEQ ID NO: 567 | SEQ ID |
| | | | NO: 1092 | NO: 564 | | NO: 327 |
| 134 | ASGYEFINCP | MKPRGGAVSYARQLQGR | GKYCTARDYYNWD | TSQYGS | SGSTRAAGIPDR | YE |
| | SEQ ID NO: 568 | SEQ ID NO: 569 | FE | SEQ ID | SEQ ID NO: 572 | SEQ ID |
| | | | SEQ ID NO: 570 | NO: 571 | | NO: 327 |
| 135 | ASGYEFINCP | MKPRHGAVSYARQLQGR | GKYCTARDYYNWD | TSQYGS | SGSTRAAGIPDR | YE |
| | SEQ ID NO: 568 | SEQ ID NO: 573 | FE | SEQ ID | SEQ ID NO: 572 | SEQ ID |
| | | | SEQ ID NO: 570 | NO: 571 | | NO: 327 |
| 136 | ASGYEFIDCT | LKPRGGAVNYARPLQGR | GKNCDYNWDFE | TSQYGS | SGSTRAAGIPDR | YE |
| | SEQ ID NO: 574 | SEQ ID NO: 575 | SEQ ID NO: 576 | SEQ ID | SEQ ID NO: 572 | SEQ ID |
| | | | | NO: 571 | | NO: 327 |
| 137 | TSGYTFTAHI | IKPQYGAVNFGGGFRDR | DRSYGDSSWALD | TSQGVGSD | HTSSVEDGVPSR | LQ |
| | SEQ ID NO: 577 | SEQ ID NO: 578 | SEQ ID NO: 579 | SEQ ID | SEQ ID NO: 581 | SEQ ID |
| | | | | NO: 580 | | NO: 336 |
| 138 | ADDDPYTDDDTFT | ISPHFARPIYSYKFRDR | DPFGDRAPHYNYH | ASQGLDSSH | GTSNRARGTPDR | YGGTPI |
| | KYW | SEQ ID NO: 967 | MD | SEQ ID | SEQ ID NO: 970 | SEQ ID |
| | SEQ ID NO: 966 | | SEQ ID NO: 968 | NO: 969 | | NO: 931 |
| 139 | TSEDIFERTEL | VKTVTGAVNFGSPDFRQ | QKFYTGGQGWYFD | AASYGH | ATSKRASGIPDR | LE |
| | SEQ ID NO: 971 | SEQ ID NO: 972 | SEQ ID NO: 973 | SEQ ID | SEQ ID NO: 975 | SEQ ID |
| | | | | NO: 974 | | NO: 937 |
| 140 | ASGFDFSRQG | IKYDGSEKYHADSVWGR | EAGGPDYRNGYNY | GTSNDVGGYES | DVSKRPSGVSNR | LTSTRRR |
| | SEQ ID NO: 582 | SEQ ID NO: 583 | YDFYDGYYNYHYM | SEQ ID | SEQ ID NO: 585 | SEQ ID |
| | | | D | NO: 340 | | NO: 342 |
| | | | SEQ ID NO: 584 | | | |
| 141 | ASGFTFHKYG | ISDDGMRKYHSDSMWGR | EAGGPIWHDDVKY | GTSSDVGGFDS | DVSHRPSGISNR | LTDRSHR |
| | SEQ ID NO: 586 | SEQ ID NO: 587 | YDFNDGYYNYHYM | SEQ ID | SEQ ID NO: 589 | SEQ ID |
| | | | D | NO: 346 | | NO: 347 |
| | | | SEQ ID NO: 588 | | | |
| 142 | VSGYSFIDYY | IDPENGEARYAEKFQGR | GAVGADSGSWFD | GSKLGDKY | ENDRRPSGIPER | WETTTTTF |
| | SEQ ID NO: 590 | SEQ ID NO: 591 | SEQ ID NO: 592 | SEQ ID | SEQ ID NO: 593 | SEQ ID |
| | | | | NO: 351 | | NO: 353 |
| 143 | ASGGAFSSYA | ITPVFGETKYAPRFQGR | DRRVVPMATDNWL | ASQTIHTY | GASTLQSGVPSR | SYSTPR |
| | SEQ ID NO: 594 | SEQ ID NO: 595 | D | SEQ ID | SEQ ID NO: 598 | SEQ ID |
| | | | SEQ ID NO: 596 | NO: 597 | | NO: 359 |
| 144 | ASGNSFSNHD | MSHEGDKTGLAQKFQGR | GSKHRLRDYFLYN | CSHSLQHSTGA | LATHRASGVPDR | GLHSPW |
| | SEQ ID NO: 599 | SEQ ID NO: 600 | EYGPNYEEWGDYL | NY | SEQ ID NO: 603 | SEQ ID |
| | | | ATLD | SEQ ID | | NO: 365 |
| | | | SEQ ID NO: 601 | NO: 602 | | |
| 145 | ASGNTFSKYD | ISHERDKTESAQRFKGR | GSKHRLRDYVLYD | STQSLRHSNGA | LGSQRASGVPDR | GLNRPW |
| | SEQ ID NO: 604 | SEQ ID NO: 605 | DYGLINYQEWNDY | NY | SEQ ID NO: 608 | SEQ ID |
| | | | LEFLD | SEQ ID | | NO: 371 |
| | | | SEQ ID NO: 606 | NO: 607 | | |
| 146 | ASGNTFSKYD | MSHEGDKTESAQRFKGR | GSKHRLRDYVLYD | STQSLRHSNGA | LGSQRASGVPDR | GLNRPW |
| | SEQ ID NO: 604 | SEQ ID NO: 609 | DYGLINYQEWNDY | NY | SEQ ID NO: 608 | SEQ ID |
| | | | LEFLD | SEQ ID | | NO: 371 |
| | | | SEQ ID NO: 606 | NO: 607 | | |
| 147 | ASGNTFRKYD | MSHEGDKTESAQRFKGR | GSKHRLRDYVLYD | STQSLRHSNGA | LGSQRASGVPDR | GLNRPW |
| | SEQ ID NO: 610 | SEQ ID NO: 609 | DYGLINQQEWNDY | NY | SEQ ID NO: 608 | SEQ ID |
| | | | LEFLD | SEQ ID | | NO: 371 |
| | | | SEQ ID NO: 611 | NO: 607 | | |
| 148 | ASQFRFDGYG | ISHDGIKKYHAEKVWGR | DLREDECEEWWSD | GNTSNIGNNF | ETDKRPSGIPDR | WAASLSSAR |
| | SEQ ID NO: 976 | SEQ ID NO: 977 | YYDFGKQLPCAKS | SEQ ID | SEQ ID NO: 979 | SEQ ID |
| | | | RGGLVGIAD | NO: 941 | | NO: 943 |
| | | | SEQ ID NO: 978 | | | |
| 149 | VSDFPFSKYP | ISGDAWHVVYSNSVQGR | MFQESGPPRLDRW | SSESLRQSNGK | EVSNRFSGVSDR | SKDFPL |
| | SEQ ID NO: 612 | SEQ ID NO: 613 | SGRNYYYYSGMD | IS | SEQ ID NO: 616 | SEQ ID |
| | | | SEQ ID NO: 614 | SEQ ID | | NO: 379 |
| | | | | NO: 615 | | |
| 150 | AYGVNTFGLYA | IWRWKSSASHHFRGR | TSTYDKWSGLHHD | ASQSITGNW | RGAALLGGVPSR | YDTYPG |
| | SEQ ID NO: 617 | SEQ ID NO: 618 | GVMAFS | SEQ ID | SEQ ID NO: 621 | SEQ ID |
| | | | SEQ ID NO: 619 | NO: 620 | | NO: 385 |
| 151 | VSGDSVSNDNYY | IYYSGTTYYNPSLRNR | MPSHGFWSTSFSY | ASQSVTKY | GTYTLLSGVSPR | AHSTPW |
| | SEQ ID NO: 980 | SEQ ID NO: 981 | WYFD | SEQ ID | SEQ ID NO: 984 | SEQ ID |
| | | | SEQ ID NO: 982 | NO: 983 | | NO: 949 |

TABLE E
VH/VL for illustrative anti-HIV binding arm

| Ab | SEQ | | SEQ | |
|---|---|---|---|---|
| Name | ID NO | VH | ID NO | VL |
| 320 | 622 | QMQLQESGPGLVKPSETLSLTCSVSGASISDSYWSWIRRS | 623 | SDISVAPGETARISCGEKSLGSRAVQWYQHRA |
| | | PGKGLEWIGYVHKSGDTNYSPSLKSRVNLSLDTSKNQVSL | | GQAPSLIIYNNQDRPSGIPERFSGSPDSPFGT |
| | | SLVAATAADSGKYYCARTLHGRRIYGIVAFNEWFTYFYMD | | TATLTITSVEAGDEADYYCHIWDSRVPTKWVF |
| | | VWGNGTQVTVSS | | GGGTTLTVL |
| 321 | 624 | QMQLQESGPGLVKPSETLSLTCSVSGASISDSYWSWIRRS | 625 | SDISVAPGETARISCGEKSLGSRAVQWYQHRA |
| | | PGKGLEWIGYVHKSGDTNYNPSLKSRVHLSLDTSKNQVSL | | GQAPSLIIYNNQDRPSGIPERFSGSPDSRPGT |
| | | SLTGVTAADSGKYYCARTLHGRRIYGIVAFNEWFTYFYMD | | TATLTITSVEAGDEADYYCHIWDSRVPTKWVF |
| | | VWGTGTQVTVSS | | GGGTTLTVL |
| 322 | 624 | QMQLQESGPGLVKPSETLSLTCSVSGASISDSYWSWIRRS | 626 | SDISVAPGETARISCGEKSLGSRAVQWYQHRA |
| | | PGKGLEWIGYVHKSGDTNYNPSLKSRVHLSLDTSKNQVSL | | GQAPSLIIYNNQDRPSGIPERFSGSPDFRPGT |
| | | SLTGVTAADSGKYYCARTLHGRRIYGIVAFNEWFTYFYMD | | TATLTITSVEAGDEADYYCHIWDSRVPTKWVF |
| | | VWGTGTQVTVSS | | GGGTTLTVL |
| 323 | 627 | QMQLQESGPGLVKPSETLSLTCSVSGASISDSYWSWIRQP | 628 | SDISVAPGETARISCGEKSLGSRAVQWYQQRA |
| | | PGKGLEWIGYVHKSGDTNYSPSLKSRVNLSLDTSKNQVSL | | GQAPSLIIYNNQDRPSGIPERFSGSPDSGFGT |
| | | SLSAATAADSGVYYCARTLHGRRIYGIVAFNEWFTYFYMD | | TATLTITSVEAGDEADYYCHIWDSRVPTKWVF |
| | | VWGNGTQVTVSS | | GGGTTLTVL |
| 324 | 629 | QVQLQESGPGLVKPSETLSVTCSVSGDSMNNYYWTWIRQS | 630 | SYVRPLSVALGETARISCGRQALGSRAVQWYQ |
| | | PGKGLEWIGYISDRESATYNPSLNSRVVISRDTSKNQLSL | | HRPGQAPILLIYNNQDRPSGIPERFSGTPDIN |
| | | KLNSVTPADTAVYYCATARRGQRIYGVVSFGEFFYYYSMD | | FGTRATLTISGVEAGDEADYYCHMWDSRSGFS |
| | | VWGKGTTVTVSS | | WSFGGATRLTVL |
| 325 | 631 | QVQLQESGPGLVKPSETLSVTCSVSGDSMNNYYWTWIRQS | 632 | SPVRPLSVALGETARISCGRQALGSRAVQWYQ |
| | | PGKGLEWIGYISDRESATYNPSLNSRVTISRDTSKNQFSL | | HRPGQAPILLIYNNQDRPSGIPERFSGTPDIN |
| | | KLNSVTPADTAVYYCARARRGQRIYGVVSFGEFFYYYSMD | | FGTRATLTISGVEAGDEADYYCHMWDSRSGFS |
| | | VWGKGTTVTVSS | | WSFGGATRLTVL |
| 326 | 633 | QVQLQESGPGLVRPSETLSVTCIVSGGSISNYYWTWIRQS | 634 | SVTSYVSPLSVALGETARISCGRQALGSRAVQ |
| | | PGKGLEWIGYISDRETTTYNPSLNSRAVISRDTSKNQLSL | | WYQHKPGQAPILLIYNNQDRPSGIPERFSGTP |
| | | QLRSVTTADTAIYFCATARRGQRIYGVVSFGEFFYYYYMD | | DINFGTTATLTISGVEVGDEADYYCHMWDSRS |
| | | VWGKGTAVTVSS | | GFSWSFGGATRLTVL |
| 327 | 635 | QVHLQESGPGLVTPSETLSLTCTVSNGSVSGRFWSWIRQS | 636 | SLNPLSLAPGATAKIPCGERSRGSRAVQWYQQ |
| | | PGRGLEWIGYFSDTDRSEYNPSLRSRLTLSVDRSKNQLSL | | KPGQAPTLIIYNNQDRPAGVSERFSGNPDVAI |
| | | KLKSVTAADSATYYCARAQQGKRIYGIVSFGELFYYYYMD | | GVTATLTISRVEVGDEGDYYCHYWDSRSPISW |
| | | AWGKGTPVTVSS | | IFAGGTQLTVL |
| 328 | 637 | QVHLQESGPGLVTPSETLSLTCTVSNGSVSGRFWSWIRQS | 638 | SLNPLSLAPGATAKIPCGERSRGSRAVQWYQQ |
| | | PGRGLEWIGYFSDTDRSEYNPSLRSRLTLSVDRSKNQLSL | | KPGQAPTLIIYNNQDRPAGVSERFSGNPDVAI |
| | | RLKSVTAADSATYYCARAQQGKRIYGIVSFGEFFYYYYMD | | GVTATLTISRVEVGDEADYYCHYWDSRSPISW |
| | | AWGKGTPVTVSS | | IFGGGTQLTVL |
| 329 | 639 | QVHLQESGPGLVKPSETLSLTCNVSGTLVRDNYWSWIRQP | 640 | TFVSVAPGQTARITCGEESLGSRSVIWYQQRP |
| | | LGKQPEWIGYVHDSGDTNYNPSLKSRVHLSLDKSKNLVSL | | GQAPSLIIYNNNDRPSGIPDRFSGSPGSTFGT |
| | | RLTGVTAADSAIYYCATTKHGRRIYGVVAFKEWFTYFYMD | | TATLTITSVEAGDEADYYCHIWDSRRPTNWVF |
| | | VWGKGTSVTVSS | | GEGTTLIVL |
| 330 | 641 | QLHLQESGPGLVKPPETLSLTCSVSGASINDAYWSWIRQS | 642 | SSMSVSPGETAKISCGKESIGSRAVQWYQQKP |
| | | PGKRPEWVGYVHHSGDTNYNPSLKRRVTFSLDTAKNEVSL | | GQPPSLIIYNNQDRPAGVPERFSASPDFRPGT |
| | | KLVDLTAADSATYFCARALHGKRIYGIVALGELFTYFYMD | | TATLTITNVDAEDEADYYCHIYDARGGTNWVF |
| | | VWGKGTAVTVSS | | DRGTTLTVL |
| 331 | 643 | QSQLQESGPRLVEASETLSLTCNVSGESTGACTYFWGWVR | 644 | QSALTQPPSASGSPGQSITISCNGTATNFVSW |
| | | QAPGKGLEWIGSLSHCQSFWGSGWTFHNPSLKSRLTISLD | | YQQFPDKAPKLIIFGVDKRPPGVPDRFSGSRS |
| | | TPKNQVFLKLTSLTAADTATYYCARFDGEVLVYNHWPKPA | | GTTASLTVSRLQTDDEAVYYCGSLVGNWDVIF |
| | | WVDLWGRGIPVTVSS | | GGGTTLTVL |
| 332 | 645 | QPQLQESGPGLVEASETLSLTCTVSGDSTAACDYFWGWVR | 646 | QSALTQPPSASGSPGQSISISCTGTSNRFVSW |
| | | QPPGKGLEWIGGLSHCAGYYNTGWTYHNPSLKSRLTISLD | | YQQHPGKAPKLVIYGVNKRPSGVPDRFSGSKS |
| | | TPKNQVFLKLNSVTAADTAIYYCARFDGEVLVYHDWPKPA | | GNTASLTVSGLQTDDEAVYYCSSLVGNWDVIF |
| | | WVDLWGRGTLVTVSS | | GGGTKLTVL |
| 333 | 647 | QPQLQESGPGLVEASETLSLTCTVSGDSTAACDYFWGWVR | 648 | QSALTQPPSASGSPGQSITISCTGNINNFVSW |
| | | QPPGKGLEWIGSLSHCAGYYNSGWTYHNPSLKSRLTISLD | | YQQHPGKAPKLVIYGVNKRPSGVPDRFSGSKS |
| | | TPKNQVFLKLNSVTAADTAIYYCARFGGDVLVYHDWPKPA | | GNAASLTVSGLQTDDEAVYYCGSLAGNWDVVF |
| | | WVDLWGRGVLVTVSS | | GGGTKLTVL |
| 334 | 649 | QPQLQESGPTLVEASETLSLTCAVSGDSTAACNSFWGWVR | 650 | QSALTQPPSASGSPGQSITISCTGTSNNFVSW |
| | | QPPGKGLEWVGSLSHCASYWNRGWTYHNPSLKSRLTLALD | | YQQHAGKAPKLVIYDVNKRPSGVPDRFSGSKS |
| | | TPKNLVFLKLNSVTAADTATYYCARFGGEVLRYTDWPKPA | | GNTASLTVSGLQTDDEAVYYCGSLVGNWDVIF |
| | | WVDLWGRGTLVTVSS | | GGGTKLTVL |
| 335 | 651 | QPQLQESGPGLVEASETLSLTCTVSGDSTAGCDYFWGWVR | 652 | QSALTQPPSASGSPGQSITISCTGTSNNFVSW |
| | | QPPGKGLEWIGGLSHCAGYYNTGWTYHNPSLKSRLTISLD | | YQQHPAKAPKLVIYGVNKRPSGVPDRFSGSKS |
| | | TPKNQVFLKLNSVTAADTAIYYCARFDGEVLVYNDWPKPA | | GNTASLTVSGLQTDDEAVYYCGSLVGNWDVIF |
| | | WVDLWGRGTLVTVSS | | GGGTKLTVL |
| 336 | 653 | QVQLQESGPGLVKPAETLSLTCSVSGESINTGHYYWGWVR | 654 | QSALTQPPSASGSLGQSVTISCNGTSSDIGGW |
| | | QVPGKGLEWIGHIHYTTAVLHNPSLKSRLTIKIYTLRNQI | | NFVSWYQQFPGRAPRLIIFEVNKRPSGVPGRF |
| | | TLRLSNVTAADTAVYHCVRSGGDILYYYEWQKPHWFSPWG | | SGSKSGNSASLTVSGLQSDDEGQYFCSSLFGR |
| | | PGIHVTVSS | | WDVVFGGGTKLTVL |
| 337 | 655 | QLQLQESGPGLVKPSETLSLTCTVSGGSMRGTDWGENDFH | 656 | EIVMTQSPPTLSVSPGETATLSCRASQNVKNN |
| | | YGWIRQSSAKGLEWIGSIHWRGRTTHYKTSFRSRATLSID | | LAWYQLKPGQAPRLLIFDASSRAGGIPDRFSG |
| | | TSNNRFSLTFSFVTAADTAVYYCARHKYHDIFRVVPVAGW | | SGYGTDFTLTVNSVQSEDFGDYFCQQYEEWPR |
| | | FDPWGQGLLVTVSS | | TFGQGTKVDIK |
| 338 | 657 | EVHLEESGPGLVRPSETLSLTCTASGGSIRGGEWGDSDYH | 658 | EIMMTQSPAILSVSPGDRATLSCRASQSVKNN |
| | | WGWVRHSPEKGLEWIGSIHWRGTTHYNAPFRGRGRLSIDL | | LAWYQKRPGQAPRLLIFDTSSRASGIPARFSG |
| | | SRNQFSLRLTSVTAEDTAVYYCVKHKYHDIVMVVPIAGWF | | GGSGTEFTLTVNSMQSEDFATYYCQQYEEWPR |
| | | DPWGQGLQVTVSS | | TFGQGTKVEIK |
| 339 | 659 | QLQMQESGPGLVKPSETLSLSCTVSGDSIRGGEWGDKDYH | 660 | EIVMTQSPDTLSVSPGETVTLSCRASQNINKN |
| | | WGWVRHSAGKGLEWIGSIHWRGTTHYKESLRRRVSMSIDT | | LAWYQYKPGQSPRLVIFETYSKIAAFPARFVA |
| | | SRNWFSLRLASVTAADTAVYFCARHRHHDVFMLVPIAGWF | | SGSGTEFTLTINNMQSEDVAVYYCQQYEEWPR |
| | | DVWGPGVQVTVSS | | TFGQGTKVDIK |
| 340 | 661 | QVQLRESGPGLVKPSETLSLSCTVSQDSRPSDHSWTWVRQ | 662 | WASSELTQPPSVSVSPGQTARITCSGAPLTSR |
| | | SPGKALEWIGDIHYNGATTYNPSLRSRVRIELDQSIPRFS | | FTYWYRQKPGQAPVLIISRSSQRSSGWSGRFS |
| | | LKMTSMTAADTGMYYCARNAIRIYGVVALGEWFHYGMDVW | | ASWSGTTVTLTIRGVQADDEADYYCQSSDTSD |
| | | GQGTAVTVSS | | SYKMFGGGTKLTVL |
| 341 | 663 | QVQLLQSGAAVTKPGASVRVSCEASGYNIRDYFIHWWRQA | 664 | DIQMTQSPSSLSASVGDTVTITCQANGYLNWY |
| | | PGQGLQWVGWINPKTGQPNNPRQFQGRVSLTRHASWDFDT | | QQRRGKAPKLLIYDGSKLERGVPSRFSGRRWG |
| | | FSFYMDLKALRSDDTAVYFCARQRSDYWDFDVWGSGTQVT | | QEYNLTINNLQPEDIATYFCQVYEFVVPGTRL |
| | | VSS | | DLK |
| 342 | 665 | QVQLLQSGAAVTKPGASVRVSCEASGYNIRDYFIHWWRQA | 666 | DIQMTQSPSSLSASVGDTATITCQANGYLNWY |
| | | PGQGLQWVGWINPKTGQPNNPRQFQGRVSLTRHASFDFDT | | QQRRGKAPKLLIYDGSKLERGVPSRFSGRRWG |
| | | FSFYMDLKALRSDDTAVYFCARQRSDYWDFDVWGSGTQVT | | QEYNLTINNLQPEDIATYFCQVYEFVVPGTRL |
| | | VSS | | DLK |
| 343 | 667 | QVHLSQSGAAVTKPGASVRVSCEASGYKISDHFIHWWRQA | 668 | DIQMTQSPSSLSARVGDTVTITCQANGYLNWY |
| | | PGQGLQWVGWINPKTGQPNNPRQFQGRVSLTRQASWDFDT | | QQRRGKAPKLLIYDGSKLERGVPARFSGRRWG |
| | | YSFYMDLKAVRSDDTAIYFCARQRSDFWDFDVWGSGTQVT | | QEYNLTINNLQPEDVATYFCQVYEFIVPGTRL |
| | | VSS | | DLK |
| 344 | 669 | QVRLSQSGGQMKKPGDSMRISCRASGYEFINCPINWIRLA | 670 | EIVLTQSPGTLSLSPGETAIISCRTSQYGSLA |
| | | PGKRPEWMGWMKPRGGAVSYARQLQGRVTMTRDMYSETAF | | WYQQRPGQAPRLVIYSGSTRAAGIPDRFSGSR |
| | | LELRSLTSDDTAVYFCTRGKYCTARDYYNWDFEHWGQGTP | | WGPDYNLTISNLESGDFGVYYCQQYEFFGQGT |
| | | VTVSS | | KVQVDIK |
| 345 | 671 | QVRLSQSGGQMKKPGDSMRISCRASGYEFINCPINWIRLA | 672 | SLTQSPGTLSLSPGETAIISCRTSQYGSLAWY |
| | | PGKRPEWMGWMKPRHGAVSYARQLQGRVTMTRDMYSETAF | | QQRPGQAPRLVIYSGSTRAAGIPDRFSGSRWG |
| | | LELRSLTSDDTAVYFCTRGKYCTARDYYNWDFEHWGQGTP | | PDYNLTISNLESGDFGVYYCQQYEFFGQGTKV |
| | | VTVSS | | QVDIK |
| 346 | 673 | QVQLVQSGGQMKKPGESMRISCRASGYEFIDCTLNWIRLA | 670 | EIVLTQSPGTLSLSPGETAIISCRTSQYGSLA |
| | | PGKRPEWMGWLKPRGGAVNYARPLQGRVTMTRDVYSDTAF | | WYQQRPGQAPRLVIYSGSTRAAGIPDRFSGSR |
| | | LELRSLTVDDTAVYFCTRGKNCDYNWDFEHWGRGTPVIVS | | WGPDYNLTISNLESGDFGVYYCQQYEFFGQGT |
| | | S | | KVQVDIK |
| 347 | 674 | RAHLVQSGTAMKKPGASVRVSCQTSGYTFTAHILFWFRQA | 675 | YIHVTQSPSSLSVSIGDRVTINCQTSQGVGSD |
| | | PGRGLEWVGWIKPQYGAVNFGGGFRDRVTLTRDVYREIAY | | LHWYQHKPGRAPKLLIHHTSSVEDGVPSRFSG |
| | | MDIRGLKPDDTAVYYCARDRSYGDSSWALDAWGQGTTVVV | | SGFHTSFNLTISDLQADDIATYYCQVLQFFGR |
| | | SA | | GSRLHIK |
| 348 | 985 | QGRLFQSGAEVKRPGASVRISCRADDDPYTDDDTFTKYWT | 986 | EVVLTQSPAILSVSPGDRVILSCRASQGLDSS |
| | | HWIRQAPGQRPEWLGVISPHFARPIYSYKFRDRLTLTRDS | | HLAWYRFKRGQIPTLVIFGTSNRARGTPDRFS |
| | | SLTAVYLELKGLQPDDSGIYFCARDPFGDRAPHYNYHMDV | | GSGSGADFTLTISRVEPEDFATYYCQRYGGTP |
| | | WGGGTAVIVSS | | ITFGGGTTLDKKRTVA |
| 349 | 987 | QVQLVQSGSGVKKPGASVRVSCWTSEDIFERTELIHWVRQ | 988 | EIVLTQSPGTLSLSPGETASLSCTAASYGHMT |
| | | APGQGLEWIGWVKTVTGAVNFGSPDFRQRVSLTRDRDLFT | | WYQKKPGQPPKLLIFATSKRASGIPDRFSGSQ |
| | | AHMDIRGLTQGDTATYFCARQKFYTGGQGWYFDLWGRGTL | | FGKQYTLTITRMEPEDFARYYCQQLEFFGQGT |
| | | IVVSS | | RLEIRRTVA |
| 350 | 676 | CQRLVESGGGVVQPGSSLRLSCAASGFDFSRQGMHWVRQA | 677 | QSALTQPASVSGSPGQSITISCNGTSNDVGGY |
| | | PGQGLEWVAFIKYDGSEKYHADSVWGRLSISRDNSKDTLY | | ESVSWYQQHPGKAPKVVIYDVSKRPSGVSNRF |
| | | LQMNSLRVEDTATYFCVREAGGPDYRNGYNYYDFYDGYYN | | SGSKSGNTASLTISGLQAEDEGDYYCKSLTST |
| | | YHYMDVWGKGTTVTVSS | | RRRVFGTGTKLTVL |
| 351 | 678 | QEQLVESGGGVVQPGGSLRLSCLASGFTFHKYGMHWVRQA | 679 | QSALTQPASVSGSPGQTITISCNGTSSDVGGF |
| | | PGKGLEWVALISDDGMRKYHSDSMWGRVTISRDNSKNTLY | | DSVSWYQQSPGKAPKVMVPDVSHRPSGISNRF |
| | | LQFSSLKVEDTAMFFCAREAGGPIWHDDVKYYDFNDGYYN | | SGSKSGNTASLTISGLHIEDEGDYFCSSLTDR |
| | | YHYMDVWGKGTTVTVSS | | SHRIFGGGTKVTVL |
| 352 | 680 | DGHLVQSGVEVKKTGATVKISCKVSGYSFIDYYLHWVQRA | 681 | SYELTQPPSVSVSPGQTASITCSGSKLGDKYV |
| | | PGKGLEWVGLIDPENGEARYAEKFQGRVTIIADTSIDTGY | | SWYQLRPGQSPILVMYENDRRPSGIPERFSGS |
| | | MEMRSLKSEDTAVYFCAAGAVGADSGSWFDPWGQGTLVTV | | NSGDTATLTISGTQALDEADFYCQAWETTTTT |
| | | SSASTKGPSVFPLAPSS | | FVFFGGGTQLTVL |
| 353 | 682 | QVLLVQSGTEVKKPGSSVKVSCQASGGAFSSYAFSWVRQA | 683 | DIQLTQSPSSLSASVGDRVTVTCRASQTIHTY |
| | | PGQGLEWMGMITPVFGETKYAPRFQGRLTLTAEESLSTTY | | LNWYQQIPGKAPKLLIYGASTLQSGVPSRFSG |
| | | MELRSLTSDDTAFYYCTRDRRVVPMATDNWLDPWGQGTLV | | SGSGTDFTLTINSLQPEDFATYYCQQSYSTPR |
| | | TVSSASTKGPSVFPLAPSS | | TFGQGTRLDIK |
| 354 | 684 | QVQLVQSGAEVKKPGSSVKVSCKASGNSFSNHDVHWVRQA | 685 | EVVITQSPLFLPVTPGEAASLSCKCSHSLQHS |
| | | TGQGLEWMGWMSHEGDKTGLAQKFQGRVTITRDSGASTVY | | TGANYLAWYLQRPGQTPRLLIHLATHRASGVP |
| | | MELRGLTADDTAIYYCLTGSKHRLRDYFLYNEYGPNYEEW | | DRFSGSGSGTDFTLKISRVESDDVGTYYCMQG |
| | | GDYLATLDVWGHGTAVTVSS | | LHSPWTFGQGTKVEIK |
| 355 | 686 | QVQLVQSGPEVKKPGSSVKVSCKASGNIFSKYDVHWVRQA | 687 | DTVVTQSPLSLPVTPGEAASMSCSSTQSLRHS |
| | | TGQGLEWVGWISHERDKTESAQRFKGRVTFTRDTSATTAY | | NGANYLAWYQHKPGQSPRLLIRLGSQRASGVP |
| | | MELRGLTSDDTAIYYCTRGSKHRLRDYVLYDDYGLINYQE | | DRFSGSGSGTHFTLKISRVEAEDAAIYYCMQG |
| | | WNDYLEFLDVWGHGTAVTVSS | | LNRPWTFGKGTKLEIK |
| 356 | 688 | QVQLEQSGAEVKKPGSSVKVSCKASGNTFSKYDVHWVRQA | 689 | DTVVTQSPLSLPVTPGEAASMSCTSTQSLRHS |
| | | TGQGLEWVGWMSHEGDKTESAQRFKGRVTFTRDTSASTAY | | NGANYLAWYQHKPGQSPRLLIRLGSQRASGVP |
| | | MELRGLTSDDTAIYYCTRGSKHRLRDYVLYDDYGLINYQE | | DRFSGSGSGTHFTLKISRVEPEDAAIYYCMQG |
| | | WNDYLEFLDVWGHGTAVTVSS | | LNRPWTFGKGTKLEIK |
| 357 | 690 | QVQLVQSGAEVKKPGSSVKVSCKASGNTFRKYDVHWVRQA | 691 | DTVVTQSPLSLSVTPGEAASMSCTSTQSLRHS |
| | | TGQGLEWVGWMSHEGDKTESAQRFKGRVSFTRDNSASTAY | | NGANYLAWYQHKPGQSPRLLIRLGSQRASGVP |
| | | IELRGLTSDDTAIYYCTGGSKHRLRDYVLYDDYGLINQQE | | DRFSGSGSGTHFTLKISRVEADDAAIYYCMQG |
| | | WNDYLEFLDVWGHGTAVTVSS | | LNRPWTFGKGTKLEIK |
| 358 | 989 | QVQLVESGGGVVQPGTSLRLSCAASQFRFDGYGMHWVRQA | 990 | QSVLTQPPSVSAAPGQKVTISCSGNTSNIGNN |
| | | PGKGLEWVASISHDGIKKYHAEKVWGRFTISRDNSKNTLY | | FVSWYQQRPGRAPQLLIYETDKRPSGIPDRFS |
| | | LQMNSLRPEDTALYYCAKDLREDECEEWWSDYYDFGKQLP | | ASKSGTSGTLAITGLQTGDEADYYCATWAASL |
| | | CAKSRGGLVGIADNWGQGTMVTVSS | | SSARVFGTGTKVIVL |
| 359 | 692 | RVQLVESGGGVVQPGKSVRLSCVVSDFPFSKYPMYWVRQA | 693 | DIVMTQTPLSLSVTPGQPASISCKSSESLRQS |
| | | PGKGLEWVAAISGDAWHVVYSNSVQGRFLVSRDNVKNTLY | | NGKTSLYWYRQKPGQSPQLLVFEVSNRFSGVS |
| | | LEMNSLKIEDTAVYRCARMFQESGPPRLDRWSGRNYYYYS | | DRFVGSGSGTDFTLRISRVEAEDVGFYYCMQS |
| | | GMDVWGQGTTVTVSS | | KDFPLTFGGGTKVDL |
| 360 | 694 | QIHLVQSGTEVKKPGSSVTVSCKAYGVNTFGLYAVNWVRQ | 695 | DIQMTQSPSTLSASIGDTVRISCRASQSITGN |
| | | APGQSLEYIGQIWRWKSSASHHFRGRVLISAVDLTGSSPP | | WVAWYQQRPGKAPRLLIYRGAALLGGVPSRFS |
| | | ISSLEIKNLTSDDTAVYFCTTTSTYDKWSGLHHDGVMAFS | | GSAAGTDFTLTIGNLQAEDFGTFYCQQYDTYP |
| | | SWGQGTLISVSA | | GTFGQGTKVEVK |
| 361 | 991 | EVQLVESGPGLVQPWGTLSLTCRVSGDSVSNDNYYWAWIR | 992 | DIQMTQSPSSLSASVGDKVTITCRASQSVTKY |
| | | QTPGRELQVIGTIYYSGTTYYNPSLRNRVTISLDKSVNVV | | LNWYQFKTGQAPRILIYGTYTLLSGVSPRFSG |
| | | SLRLGSVSAADTAQYYCVRMPSHGFWSTSFSYWYFDLWGR | | AGSGSLYTLTITNIQPEDFATYYCQQAHSTPW |
| | | GHFVAVSW | | TFGQGTHVAANRTVA |

### 4. Fe Domains or Fe Regions

[0162] In certain embodiments, the Fc region or Fc domain of one or both of the CD3-targeting heavy chain and the HIV antigen-targeting heavy chain is from a human IgG. In one embodiment, the Fc region or Fc domain of the multi-specific antigen binding molecule is an IgG1, IgG2, IgG4, or chimeras thereof. In some embodiments, the antibody has a chimeric heavy chain constant region (e.g., having the CH1, hinge, and CH2 regions of IgG4 and CH3 region of IgG1). In some embodiments, the Fc region is from a human IgG1 or IgG4. In some embodiments, the Fc region is from a human IgG1. In some embodiments, the Fc region is from a human IgG4.

[0163] In certain embodiments the Fc region or Fc domain of one or both of the CD3-targeting heavy chain and the HIV antigen-targeting heavy chain, is directly linked to, or linked via an intervening amino acid sequence (e.g., a G-S linker), to a human IgG1 (e.g., a wild-type or mutant IgG1m3 sequence), IgG2, IgG3 or IgG4 with 1 to 10 (e.g., 1, 2, 3, 4, 5, 6, 7, 8, 9, 10) amino acid substitutions. In some embodiments, the Fc modifications can promote one or more of increased serum half-life or decreased antibody effector function of the molecule. In other embodiments, certain of these modifications, decrease antibody effector function and increase half-life of the antibody. In some embodiments, the Fc region or Fc domain of one or both of the CD3-targeting heavy chain and the HIV antigen-targeting heavy chain comprise two or more, three or more, four or more, five or more, six or more, six or fewer, five or fewer, four or fewer, three or fewer, two or fewer, or one modified Fe amino acid residue(s). As appropriate, the Fc region or Fc domain of one or both of the CD3-targeting heavy chain and the HIV antigen-targeting heavy chain can be the same or different. In some embodiments, the Fc region or Fc domain of one or both of the CD3-targeting heavy chain and the HIV antigen-targeting heavy chain independently can comprise two or more, three or more, four or more, five or more, six or more, six or fewer, five or fewer, four or fewer, three or fewer, two or fewer, or one modified Fe amino acid residue(s). Illustrative amino acid substitutions are described below.

### IgG1 Isotype Fc

[0164] In one embodiment, the Fc region comprises or is derived from a human IgG1. In some embodiments, the antibody has a chimeric heavy chain constant region (e.g., having the CH1, hinge, CH2 regions of IgG4 and CH3 region of IgG1).

[0165] IgG1 antibodies exist in various allotypes and isoallotypes. In various embodiments, one or both of the Fc region or Fc domain of the CD3-targeting heavy chain and the HIV antigen-targeting heavy chain include an IgG1 heavy chain having an allotype of G1 m1; nG1m2; G1m3; G1m17,1; G1m17,1,2; G1m3,1; or G1m17. Each of these allotypes or isoallotypes is characterized by the following amino acid residues at the indicated positions within the IgG1 heavy chain constant region (Fc) (EU numbering):
[0166] G1 m1: D356, L358;
[0167] nG1m1: E356, M358;
[0168] G1m3: R214, E356, M358, A431;
[0169] G1m17,1: K214, D356, L358, A431;
[0170] G1m17,1,2: K214, D356, L358, G431;
[0171] G1m3,1: R214, D356, L358, A431; and
[0172] G1m17: K214, E356, M358, A431.

[0173] In certain embodiments, the Fc region or Fc domain of the multi-specific antigen binding molecule comprises a wild-type IgG1m3 sequence (e.g., SEQ ID NO: 1089), or has at least 80%, at least 85%, at least 90%, at least 91%, at least 92%, at least 93%, at least 94%, at least 95%, at least 96%, at least 97%, at least 98%, or at least 99% identical to a wild-type IgG1m3 sequence (e.g., SEQ ID NO: 1089), as provided below.

(SEQ ID NO: 1089)
ASTKGPSVFPLAPSSKSTSGGTAALGCLVKDYFPEPVTVSWNSGALTSGV
HTFPAVLQSSGLYSLSSVVTVPSSSLGTQTYICNVNHKPSNTKVDKRVEP
KSCDKTHTCPPCPAPELLGGPSVFLFPPKPKDTLMISRTPEVTCVVVDVS
HEDPEVKFNWYVDGVEVHNAKTKPREEQYNSTYRVVSVLTVLHQDWLNGK
EYKCKVSNKALPAPIEKTISKAKGQPREPQVYTLPPSREEMTKNQVSLTC
LVKGFYPSDIAVEWESNGQPENNYKTTPPVLDSDGSFFLYSKLTVDKSRW
QQGNVFSCSVMHEALHNHYTQKSLSLSPGK.

[0174] In certain embodiments, the Fc region or Fc domain of one or both of the CD3-targeting heavy chain and the HIV antigen-targeting heavy chain is from an IgG1 isotype. In some embodiments, the Fc region or Fc domain of one or both of the CD3-targeting heavy chain and the HIV antigen-targeting heavy chain contains a human IgG1 constant region. In some embodiments, the human IgG1 Fc region contains one or more modifications. For example, in some embodiments, the Fc region contains one or more amino acid substitutions (e.g., relative to a wild-type Fc region of the same isotype). In some embodiments, the one or more amino acid substitutions are selected from N297A, N297Q (Bolt S et al. (1993) Eur J Immunol 23:403-411), D265A, L234A, L235A (McEarchem et al., (2007) Blood, 109:1185-1192), C226S, C229S (McEarchem et al., (2007) Blood. 109:1185-1192), P238S (Davis et al., (2007) J Rheumatol, 34:2204-2210), E233P, L234V (McEarchern et al., (2007) Blood, 109:1185-1192), P238A, A327Q, A327G, P329A (Shields R L. et al., (2001) J Biol Chem. 276(9):6591-604), K322A, L234F, L235E (Hezareh, et al., (2001) J Virol 75, 12161-12168; Oganesyan et al., (2008). Acta Crystallographica 64, 700-704), P331S (Oganesyan et al., (2008) Acta Crystallographica 64, 700-704), T394D (Wilkinson et al. (2013) MAbs 5(3): 406-417), A330L, M252Y, S254T, and T256E, where the amino acid position is according to the EU numbering convention. In certain embodiments, the Fc region further includes an amino acid deletion at a position corresponding to glycine 236 according to the EU numbering convention.

[0175] In some embodiments, the Fc region or Fc domain of one or both of the CD3-targeting heavy chain and the HIV antigen-targeting heavy chain has an IgG1 isotype with a heavy chain constant region that contains a C220S amino acid substitution according to the EU numbering convention.

[0176] In some embodiments, the Fc region comprises a human IgG1 isotype and comprises one or more amino acid substitutions in the Fc region at a residue position selected from the group consisting of: N297A, N297G, N297Q, N297G, D265A, L234A, L235A, C226S, C229S, P238S, E233P, L234V, P238A, A327Q, A327G, P329A, P329G, K322A, L234F, L235E, P331S, T394D, A330L, M252Y, S254T, T256E, M428L, N434S, T366W, T366S, L368A, Y407V and any combination thereof, wherein the numbering of the residues is according to EU numbering. In some embodiments, the Fc region comprises a human IgG1 isotype and comprises one or more amino acid substitutions in the Fc region at a residue position selected from the group consisting of: L234A, L234V, L234F, L235A, L235E, A330L, P331S, and any combination thereof, wherein the numbering of the residues is according to EU numbering. In some embodiments, the Fc region comprises a human IgG1 isotype and comprises the amino acid substitutions in the Fc region of L234A, L235A, and P331S, wherein the numbering of the residues is according to EU numbering. In some embodiments, the Fc region comprises a human IgG1 isotype and comprises the amino acid substitutions in the Fc region of M252Y, S254T, T256E, wherein the numbering of the residues is according to EU numbering. In some embodiments, the Fc region comprises a human IgG1 isotype and comprises the amino acid substitutions in the Fc region of T366S, L368A, Y407V, wherein the numbering of the residues is according to EU numbering. In some embodiments, the Fc region comprises a human IgG1 isotype and comprises the amino acid substitutions in the Fc region of L234A, L235A, P331S, T366S, L368A and Y407V, wherein the numbering of the residues is according to EU numbering. In some embodiments, the Fc region comprises a human IgG1 isotype and comprises the amino acid substitutions in the Fc region of L234A, L235A, P331S, M252Y, S254T and T256E, wherein the numbering of the residues is according to EU numbering.

### IgG4 Isotype Fc

[0177] For uses where effector function is to be avoided altogether, e.g. when antigen binding alone is sufficient to generate the desired therapeutic benefit, and effector function only leads to (or increases the risk of) undesired side effects, IgG4 antibodies may be used, or antibodies or fragments lacking the Fc region or a substantial portion thereof can be devised, or the Fc may be mutated to eliminate glycosylation altogether (e.g. N297A). Alternatively, a hybrid construct of human IgG2 (CHI domain and hinge region) and human IgG4 (CH2 and CH3 domains) has been generated that is devoid of effector function, lacking the ability to bind the FcγRs (like IgG2) and unable to activate complement (like IgG4). (see, Rother et al. (2007) Nat. Biotechnol. 25:1256; Mueller et al. (1997) Mol. Immunol. 34:441; and Labrijn et al. (2008) Curr. Op. Immunol. 20:479, discussing Fc modifications to reduce effector function generally).

[0178] In certain embodiments, the Fc region or Fc domain of one or both of the CD3-targeting heavy chain and the HIV antigen-targeting heavy chain has an IgG4 isotype. In some embodiments, the Fc region or Fc domain of one or both of the CD3-targeting heavy chain and the HIV antigen-targeting heavy chain contains a human IgG4 constant region. In some embodiments, the human IgG4 constant region includes an Fc region. In some embodiments, the Fc region contains one or more modifications. For example, in some embodiments, the Fc region contains one or more amino acid substitutions (e.g., relative to a wild-type Fc region of the same isotype). In some embodiments, the one or more amino acid substitutions are selected from E233P, F234V, F234A, L235A, G237A, E318A, S228P, L235E, T394D, M252Y, S254T, T256E, N297A, N297G, N297Q, T366W, T366S, L368A, Y407V, M428L, N434S, and any combination thereof, where the amino acid position is according to the EU numbering convention. See, e.g., Hutchins et al. (1995) Proc Natl Acad Sci USA, 92:11980-11984; Reddy et al., (2000) J Immunol, 164:1925-1933; Angal et al., (1993) Mol Immunol. 30(1):105-8; U.S. Pat. No. 8,614,299 B2; Vafa O. et al., (2014) Methods 65:114-126; and Jacobsen et. al., J. Biol. Chem(2017) 292(5):1865-1875. In some embodiments, the Fc region comprises a human IgG4 isotype and comprises one or more amino acid substitutions in the Fc region at a residue position selected from the group consisting of: F234V, F234A, L235A, L235E, S228P, and any combination thereof, wherein the numbering of the residues is according to EU numbering.

[0179] In some embodiments, an IgG4 variant of the present disclosure may be combined with at least one of an S228P mutation according to the EU numbering convention (Angal et al., (1993) Mol Immunol, 30:105-108) and with one or more mutations described in Peters et al., (2012) J Biol Chem. 13; 287(29):24525-33) to enhance antibody stabilization.

### IgG2 Isotype Fc

[0180] In certain embodiments, the Fc region or Fc domain of one or both of the CD3-targeting heavy chain and the HIV antigen-targeting heavy chain has an IgG2 isotype. In some embodiments, the Fc region or Fc domain of one or both of the CD3-targeting heavy chain and the HIV antigen-targeting heavy chain contains a human IgG2 constant region. In some embodiments, the human IgG2 constant region includes an Fc region. In some embodiments, the Fc region contains one or more modifications. For example, in some embodiments, the Fc region contains one or more amino acid substitutions (e.g., relative to a wild-type Fc region of the same isotype). In some embodiments, the one or more amino acid substitutions are selected from P238S, V234A, G237A, H268A, H268Q, H268E, V309L, N297A, N297G, N297Q, V309L, A330S, P331 S, C232S, C233S, M252Y, S254T, and T256E, where the amino acid position is according to the EU numbering convention (Vafa, et al., (2014) Methods 65:114-126).

Fc Mutations that Increase Serum Half-Life

[0181] In some embodiments, the Fc region or Fc domain of one or both of the CD3-targeting heavy chain and the HIV antigen-targeting heavy chain comprise amino acid modifications that promote an increased serum half-life of the multi-specific antigen binding molecule. Mutations that increase the half-life of an antibody have been described. In one embodiment, the Fc region or Fc domain of one or both of the CD3-targeting heavy chain and the HIV antigen-targeting heavy chain comprise a methionine to tyrosine substitution at position 252 (EU numbering), a serine to threonine substitution at position 254 (EU numbering), and a threonine to glutamic acid substitution at position 256 (EU numbering). See, e.g., U.S. Pat. No. 7,658,921. This type of mutant, designated as a “YTE mutant” exhibits a four-fold increased half-life relative to wild-type versions of the same antibody (Dall'Acqua, et al., J Biol Chem, 281: 23514-24 (2006); Robbie, et al., Antimicrob Agents Chemotherap., 57(12):6147-6153 (2013)). In certain embodiments, the Fc region or Fc domain of one or both of the CD3-targeting heavy chain and the HIV antigen-targeting heavy chain comprise an IgG constant domain comprising one, two, three or more amino acid substitutions of amino acid residues at positions 251-257, 285-290, 308-314, 385-389, and 428-436 (EU numbering). Alternatively, M428L and N434S (“LS”) substitutions can increase the pharmacokinetic (PK) half-life of the multi-specific antigen binding molecule. In other embodiments, the Fc region or Fc domain of one or both of the CD3-targeting heavy chain and the HIV antigen-targeting heavy chain comprise a M428L and N434S substitution (EU numbering). In other embodiments, the Fc region or Fc domain of one or both of the CD3-targeting heavy chain and the HIV antigen-targeting heavy chain comprise T250Q and M428L (EU numbering) mutations. In other embodiments, the Fc region or Fc domain of one or both of the CD3-targeting heavy chain and the HIV antigen-targeting heavy chain comprise H433K and N434F (EU numbering) mutations.

Fc Mutations that Reduce or Eliminate Effector Activity

[0182] In some embodiments, the Fc region or Fc domain of one or both of the CD3-targeting heavy chain and the HIV antigen-targeting heavy chain have amino acid substitutions that reduce or eliminate Fc effector function (including, e.g., antibody-dependent cellular cytotoxicity (ADCC), antibody-dependent cellular phagocytosis (ADCP), and complement-dependent cytotoxicity (CDC)).

[0183] In some embodiments, the Fc region is altered by replacing at least one amino acid residue with a different amino acid residue to reduce or eliminate effector function(s) of the antibody. For example, one or more amino acids selected from amino acid residues 234, 235, 236, 237, 297, 318, 320 and 322 (EU numbering) can be replaced with a different amino acid residue such that the multi-specific antigen binding molecule has decreased affinity for an effector ligand. The effector ligand to which affinity is altered can be, for example, an Fc receptor (e.g., at residue positions 234, 235, 236, 237, 297 (EU numbering)) or the C1 component of complement (e.g., at residue positions 297, 318, 320, 322 (EU numbering)). U.S. Pat. Nos. 5,624,821 and 5,648,260, both by Winter et al.

[0184] Fc modifications reducing or eliminating effector function include substitutions, insertions, and deletions, e.g., at one or more positions including 234, 235, 236, 237, 267, 269, 325, and 328, e.g., 234G, 235G, 236R, 237K, 267R, 269R, 325L, and 328R (EU numbering). Further, an Fc variant may comprise 236R/328R. Other modifications for reducing FcγR and complement interactions include substitutions at positions 297A, 234A, 235A, 318A, 228P, 236E, 268Q, 309L, 330S, 331S, 220S, 226S, 229S, 238S, 233P, and 234V (EU numbering). These and other modifications are reviewed in Strohl (2009) Current Opinion in Biotechnology 20:685-691. Effector functions (both ADCC and complement activation) can be reduced, while maintaining neonatal FcR binding (maintaining half-life), by mutating IgG residues at one or more of positions 233-236 and 327-331, such as E233P, L234V, L235A, optionally G236A, A327G, A330S and P331S in IgG1; E233P, F234V, L235A, optionally G236A, in IgG4; and A330S and P331S in IgG2 (EU numbering). See Armour et al. (1999) Eur. J. Immunol. 29:2613; WO 99/58572. Other mutations that reduce effector function include L234A and L235A (“LALA”) in IgG1 (Alegre et al. (1994) Transplantation 57:1537); V234A and G237A in IgG2 (Cole et al. (1997) J. Immunol. 159:3613; see also U.S. Pat. No. 5,834,597); and S228P and L235E for IgG4 (Reddy et al. (2000) J. Immunol. 164:1925). Another combination of mutations for reducing effector function in a human IgG1 include L234F, L235E and P331S. Oganesyan et al. (2008) Acta Crystallogr. D. Biol. Crystallogr. 64:700. See generally Labrijn et gal. (2008) Curr. Op. Immunol. 20:479. Additional mutations found to decrease effector function in the context of an Fc (IgG1) fusion protein (abatacept) include C226S, C229S and P238S (EU numbering). Davis et al. (2007) J. Immunol. 34:2204.

[0185] ADCC activity may be reduced by modifying the Fc region. In certain embodiments, sites that affect binding to Fc receptors may be removed, e.g., sites other than salvage receptor binding sites. In other embodiments, an Fc region may be modified to remove an ADCC site. Exemplary ADCC sites have been described with respect to ADCC sites in IgG1 (Sarmay, et al, (1992) Molec. Immunol. 29 (5): 633-9). In one embodiment, the G236R and L328R variant of human IgG1 effectively eliminates FcγR binding (Horton, et al. (2011) J. Immunol. 186:4223 and Chu, et al. (2008) Mol. Immunol. 45:3926). In other embodiments, the Fc having reduced binding to FcγRs comprises the amino acid substitutions L234A, L235E and G237A. Gross, et al. (2001) Immunity 15:289. Modifications in the IgG Fc region to decrease binding to FcγRI to decrease ADCC (e.g., 234A; 235E; 236A; G237A) identified in WO 88/007089 can be used in the present fusion proteins. See also Duncan & Winter (1988) Nature 332:563; Chappel et al. (1991) Proc. Nat'l Acad. Sci. (USA) 88:9036; and Sondermann et al. (2000) Nature 406:267 (discussing the effects of these mutations on FcγRIII binding). In some embodiments, the Fc having reduced binding to FcγRs comprises the amino acid substitutions L234A and L235A.

[0186] CDC activity may also be reduced by modifying the Fc region. Mutations at IgG1 positions D270, K322, P329 and P331, specifically alanine mutations D270A, K322A, P329A and P331A, significantly reduce the ability of the corresponding antibody to bind C1q and activate complement (Idusogie et al. (2000) J. Immunol. 164:4178; WO 99/51642. Modification of position 331 of IgG1 (e.g. P331S) has been shown to reduce complement binding (Tao et al. (1993) J. Exp. Med. 178:661; Xu Y, et al. J Biol Chem. 1994. 269:3469-74; and Canfield & Morrison (1991) J. Exp. Med. 173:1483). In another example, one or more amino acid residues within amino acid positions 231 to 239 are altered to thereby reduce the ability of the antibody to fix complement (WO 94/29351). Modifications in the IgG Fc region identified in WO 88/007089 that reduce or eliminate binding to complement component C1q, and therefore reduce or eliminate CDC (e.g., E318A or V/K320A and K322A/Q) can be used in the present fusion proteins.

[0187] In some embodiments, the Fc with reduced complement fixation has the amino acid substitutions A330S and P331S. Gross et al. (2001) Immunity 15:289. In some embodiments, the Fc with reduced complement fixation has the amino acid substitution P331S.

[0188] In certain embodiments, the Fc region or Fc domain of one or both of the CD3-targeting heavy chain and the HIV antigen-targeting heavy chain have essentially no effector function, e.g., one or both of the Fc domains have reduced or eliminated binding to FcγRs and reduced or eliminated complement fixation, e.g., is effectorless. An exemplary IgG1 Fc that is effectorless comprises the following five mutations: L234A, L235E, G237A, A330S and P331S (EU numbering) (Gross et al. (2001) Immunity 15:289). These five substitutions may be combined with N297A to eliminate glycosylation as well.

[0189] In certain embodiments, the multi-specific antigen binding molecules comprise the L234F, L235E, D264A mutations, which are collectively referred to as “FEA.” The FEA mutations decrease or abrogate effector function. In certain embodiments, the multi-specific antigen binding molecules comprise the L234F, L235E, D264A, and F405L mutations, which are collectively referred to as “FEAL.” In certain embodiments, the multi-specific antigen binding molecules comprise the L234F, L235E, D264A, and a mutation selected from the group consisting of F405L, F405A, F405D, F405E, F405H, F405I, F405K, F405M, F405N, F405Q, F405S, F405T, F405V, F405W, and F405Y. In certain embodiments, the multi-specific antigen binding molecules comprise the L234F, L235E, D264A, and K409R mutations, which are collectively referred to as “FEAR.” In certain embodiments, FEAL and FEAR are comprised in a multi-specific antigen binding molecule described herein. In certain embodiments, the multi-specific antigen binding molecules additionally comprise the M428L and N434S mutations, which are collectively referred to as LS. In certain embodiments, the multi-specific antigen binding molecules comprise the L234F, L235E, D264A, F405L, M428L, and N434S mutations, which are collectively referred to as “FEALLS.” In certain embodiments, the multi-specific antigen binding molecules comprise the L234F, L235E, D264A, M428L, and N434S mutations along with one further mutation selected from the group consisting of F405L, F405A, F405D, F405E, F405H, F405I, F405K, F405M, F405N, F405Q, F405S, F405T, F405V, F405W, and F405Y. In certain embodiments, the multi-specific antigen binding molecules comprise the L234F, L235E, D264A, K409R, M428L, and N434S mutations which are collectively referred to as “FEARLS.” In certain embodiments, FEALLS and FEARLS are comprised in a multi-specific antigen binding molecule described herein.

[0190] Other Fc variants having one or both of reduced ADCC and reduced CDC are disclosed at Glaesner et al. (2010) Diabetes Metab. Res. Rev. 26:287 (F234A and L235A to decrease ADCC and ADCP in an IgG4); Hutchins et al. (1995) Proc. Nat'l Acad. Sci. (USA) 92:11980 (F234A, G237A and E318A in an IgG4); An et al. (2009) MAbs 1:572 and U.S. Pat. App. Pub. 2007/0148167 (H268Q, V309L, A330S and P331S in an IgG2); McEarchern et al. (2007) Blood 109:1185 (C226S, C229S, E233P, L234V, L235A in an IgG1); Vafa et al. (2014) Methods 65:114 (V234A, G237A, P238S, H268A, V309L, A330S, P331S in an IgG2) (EU numbering).

[0191] By reducing or abrogating effector function on the Fc domains of the CD3×gp120 multi-specific/bispecific antigen binding molecule (i) T-cells bound by the molecule, including those not infected with HIV, are not killed by innate effector cells e.g., NK cells, macrophages; and (ii) T-cells are not activated in the absence of target cells due to reduced binding to FcγRs on innate effector cells. Activation of T-cells in the absence of target cells could lead to an intolerable cytokine response. Binding of the bispecific molecule to FcγRs on innate effector cells could lead to clustering of the CD3 molecules on the T-cells, resulting in antigen-independent T-cell activation.

Fc Mutations that Facilitate Heterodimerization

[0192] In some embodiments, first and second Fe domains have mutations to facilitate heterodimerization. Mutations in Fc domain pairs that facilitate or promote heterodimerization are reviewed in Ha, et al., Front. Immunol. (2016) 7:394. In some embodiments, the first Fc domain and the second Fc domain comprise the following amino acid substitutions (EU numbering), respectively (or vice versa): T366W and T366S/L368A/Y407V; T366W/S354C and T366S/L368A/Y407V/Y349C; S364H/F405A and Y349T/T394; T350V/L351Y/F405A/Y407V and T350V/T366L/K392L/T394W; K360D/D399M/Y407A and E345R/Q347R/T366V/K409V; K409D/K392D and D399K/E356K; K360E/K409W and Q347R/D399V/F405T; K360E/K409W/Y349C and Q347R/D399V/F405T/S354C; or K370E/K409W and E357N/D399V/F405T. In some embodiments, the first Fc domain and the second Fc domain comprise the following amino acid substitutions (EU numbering), respectively (or vice versa): T366W and T366S/L368A/Y407V.

[0193] In some embodiments, Fc region heterodimerization of the two different heavy chain-containing species can be facilitated by so-called ‘knobs-into-holes’ mutations (Atwell et al. 1997. JMB 270:26-35). The ‘hole’ mutations (T366S, L368A and Y407V (“SAV”)) are incorporated into one Fc-containing chain, the T366W ‘knob’ (“W”) mutation is incorporated into the other chain. In addition, a C220S mutation can be incorporated into an IgG1 hinge region of a scFv-containing arm to eliminate a free cysteine that otherwise forms a disulfide bond with a corresponding cysteine in the light chain in a wild-type IgG1. Co-transfection of such constructs leads to preferential formation of a heterodimeric Fc, with low levels of homodimer contaminants. Additionally, incorporating a S354C mutation can be incorporated into the Fc containing the ‘knob’ mutations and a Y349C mutation into the Fc containing the ‘hole’ mutations can optionally be used to generate a covalent bond between the two halves of the heterodimeric Fc if additional thermodynamic stability is desired (Merchant et al. 1998. Nat. Biotechnol. 16: 677-81).

[0194] To facilitate purification of the heterodimeric molecule away from contaminating homodimeric products, the H435R (“R”) or H435R+Y436F (“RF”) mutations to reduce or eliminate Protein A binding can be introduced into one but not both of the Fc-containing chains (Jendeberg, L. et al. 1997 J. Immunol. Methods 201:25-34). This reduces or eliminates Protein A binding of the homodimer contaminant containing these mutations, and greatly simplifies purification of the desired heterodimer away from remaining homodimer contaminant via additional chromatography steps (e.g. ion exchange). In embodiments incorporating H435R (or H435R+Y436F) mutations in the first or second Fc region of a heavy chain, if the VH region in the same heavy chain is from a VH3 family variable region, this VH region can also include amino acid substitutions, as described herein, to reduce or eliminate Protein A binding of the entire heavy chain. In some embodiments, the H435R is introduced into one of the Fc-containing chains.

[0195] In certain embodiments, the one or more modifications are selected from the following Fc amino acid substitutions (EU numbering) or combinations thereof: L234F; L235E; G236A; S239D; F243L; D265E; D265A; S267E; H268F; R292P; N297Q; N297A; S298A; S324T; I332E; S239D; A330L; L234F; L235E; P331S; F243L; Y300L; V305I; P396L; S298A; E333A; K334A; E345R; L235V; F243L; R292P; Y300L; P396L; M428L; E430G; N434S; G236A, S267E, H268F, S324T, and I332E; G236A, S239D, and I332E; S239D, A330L, I332E; L234F, L235E, and P331S; F243L, R292P, Y300L, V305I, and P396L; G236A, H268F, S324T, and I332E; S239D, H268F, S324T, and I332E; S298A, E333A, and K334A; L235V, F243L, R292P, Y300L, and P396L; S239D, I332E; S239D, S298A, and I332E; G236A, S239D, I332E, M428L, and N434S; G236A, S239D, A330L, I332E, M428L, and N434S; S239D, I332E, G236A and A330L; M428L and N4343S; M428L, N434S; G236A, S239D, A330L, and I332E; and G236A and I332E. In certain embodiments, the one or more modifications is selected from the group consisting of: N297A, D265A, L234F, L235E, N297Q, and P331S. In certain embodiments, the one or more modifications is N297A or D265A. In certain embodiments the one or more modifications are L234F and L235E. In certain embodiments, the one or more modifications are L234F, L234E, and D265A. In certain embodiments, the one or more modifications are L234F, L234E, and N297Q. In certain embodiments, the one or more modifications are L234F, L235E, and P331S. In certain embodiments, the one or more modifications are D265A and N297Q. In certain embodiments, the one or more modifications are L234F, L235E, D265A, N297Q, and P331S. In some embodiments the modifications are L234A, L235A, P331S, T366S, L368A, Y407V and H435R. In some embodiments the modifications are L234A, L235A, P331S, T366W, M252Y, S254T and T256E.

[0196] Combined mutations that reduce Fc-receptor binding and find use in the present antigen binding molecules include, for example, N297A; N297Q; D265A; L234F/L235E; L234F/L235E/N297Q; L234F/L235E/P331S; D265A/N297Q; and L234F/L235E/D265A/N297Q/P331S (all EU numbering). In certain embodiments the multi-specific antigen binding molecules described herein comprise L234F and L235E mutations. In certain embodiments the multi-specific antigen binding molecules described herein comprise L234F, L235E, and D265A mutations. In certain embodiments the multi-specific antigen binding molecules described herein comprise L234F, L235E, and N297Q mutations. In certain embodiments the multi-specific antigen binding molecules described herein comprise an N297A or N297Q mutation. In certain embodiments the multi-specific antigen binding molecules described herein comprise an N297A or N297Q mutation as well as L234F, L235E, and D265A mutations. In certain embodiments, one, two, three, four, or more amino acid substitutions are introduced into a Fc region to alter the effector function of the antigen binding molecule. For example, these substitutions are located at positions selected from the group consisting of amino acid residues 234, 235, 236, 237, 265, 297, 318, 320, and 322, (according to EU numbering). These positions can be replaced with a different amino acid residue such that the antigen binding molecule has an altered (e.g., reduced) affinity for an effector ligand (e.g., an Fc receptor or the C1 component of complement), but retains the antigen binding ability of the parent antibody. In certain embodiments, the multi-specific antigen binding molecules described herein comprise one or more of E233P, L234V, L235A, and G236A mutations (EU numbering). In some embodiments, the multi-specific antigen binding molecules comprise one or more of A327G, A330S, and P331S mutations (EU numbering). In some embodiments, the multi-specific antigen binding molecules comprise K322A mutations (EU numbering). In some embodiments the multi-specific antigen binding molecules comprise E318A, K320A, and K322A (EU numbering) mutations. In certain embodiments, the multi-specific antigen binding molecules comprise a L235E (EU numbering) mutation.

[0197] In some embodiments, the Fc region or Fc domain of one or both of the CD3-targeting heavy chain and the HIV antigen-targeting heavy chain does not comprise a hinge region; or the hinge region is truncated or deleted, in whole or in part. The structural hinge region of human IgG1, IgG2 and IgG4 antibodies is a peptide linker of 19 to 23 amino acids containing two to four cysteine residues, is genetically encoded on the hinge exon together with the 5′-end of the CH2 exon, and allows for disulfide bridges between first and second Fc domains (Roux, et al., J. Immunol. (1998) 161:4083). The structural hinge region is comprised of amino acid residue positions 216-238 (EU numbering) or 226-251 (Kabat numbering) (identified on imgt.org). In some embodiments, the Fc region or Fc domain of one or both of the CD3-targeting heavy chain and the HIV antigen-targeting heavy chain comprises or is derived from a human IgG4 isotype and does not comprise the amino acid sequence ESKYGPPCPPCP (SEQ ID NO: 504). In some embodiments, the Fc region or Fc domain of one or both of the CD3-targeting heavy chain and the HIV antigen-targeting heavy chain comprises or is derived from a human IgG1 isotype and does not comprise the amino acid sequence EPKSCDKTHTCPPCP (SEQ ID NO: 993) or EPKSCDKTHTCPPCPAPELL (SEQ ID NO: 994). As appropriate, the hinge region of the Fc domain of one or both of the CD3-targeting heavy chain and the HIV antigen-targeting heavy chain can be the same or different.

[0198] In various embodiments, the Fc region or Fc domain of the CD3-targeting heavy chain and the HIV antigen-targeting heavy chain comprise a heterodimeric human IgG1, comprising amino acid sequences set forth, respectively, or comprising amino acid sequences that are at least 80%, at least 85%, at least 90%, at least 91%, at least 92%, at least 93%, at least 94%, at least 95%, at least 96%, at least 97%, at least 98%, or at least 99% identical to the amino acid sequences set forth, respectively: SEQ ID NOs.: 696 and 697; SEQ ID NOs.: 697 and 696; SEQ ID NOs.: 696 and 698; SEQ ID NOs.: 698 and 696; SEQ ID NOs.: 699 and 700; SEQ ID NOs.: 700 and 699; SEQ ID NOs.: 701 and 698; SEQ ID NOs.: 698 and 701; SEQ ID NOs.: 702 and 703; SEQ ID NOs.: 703 and 702; SEQ ID NOs.: 704 and 698; SEQ ID NOs.: 698 and 704; SEQ ID NOs.: 705 and 703; SEQ ID NOs.: 703 and 705; SEQ ID NOs.: 706 and 704; SEQ ID NOs.: 704 and 706; SEQ ID NOs.: 707 and 703; SEQ ID NOs.: 703 and 707; SEQ ID NOs.: 708 and 704; SEQ ID NOs.: 704 and 708; SEQ ID NOs.: 709 and 710; or SEQ ID NOs.: 710 and 709.

[0199] In some embodiments, the Fc region or Fc domain of the CD3-targeting heavy chain and the HIV antigen-targeting heavy chain comprise a heterodimeric human IgG1, comprising amino acid sequences that are at least 80%, at least 85%, at least 90%, at least 91%, at least 92%, at least 93%, at least 94%, at least 95%, at least 96%, at least 97%, at least 98%, or at least 99% identical to the amino acid sequences set forth, respectively: SEQ ID NOs.: 703 and 705. In some embodiments the Fc region or Fc domain of the CD3-targeting heavy chain and the HIV antigen-targeting heavy chain comprise a heterodimeric human IgG1, comprising amino acid sequences that are at least 95% identical to the amino acid sequences set forth, respectively: SEQ ID NOs.: 703 and 705. In some embodiments, the Fc region or Fc domain of the CD3-targeting heavy chain and the HIV antigen-targeting heavy chain comprise a heterodimeric human IgG1, comprising amino acid sequences that are at least 99% identical to the amino acid sequences set forth, respectively: SEQ ID NOs.: 703 and 705. In some embodiments, the Fc region or Fc domain of the CD3-targeting heavy chain and the HIV antigen-targeting heavy chain comprise a heterodimeric human IgG1, comprising amino acid sequences set forth, respectively: SEQ ID NOs.: 703 and 705.

[0200] Illustrative sequences of complementarity first and second Fc domain pairs of the multi-specific antigen binding molecules, targeting HIV gp120, are provided in Table F. In some embodiments, the first Fc domain in a Fc domain pair is fused to the first antigen binding domain, targeting CD3. In such embodiments, the second Fc domain in a Fc domain pair is fused to the second antigen binding domain, targeting an HIV antigen. In some embodiments, the second Fc domain in a Fc domain pair is fused to the first antigen binding domain, targeting CD3. In such embodiments, the first Fc domain in a Fc domain pair is fused to the second antigen binding domain, targeting an HIV antigen.

TABLE F
Fc regions - Heterodimeric pairs

| Fc aa | SEQ ID | | Fc aa | SEQ ID | |
|---|---|---|---|---|---|
| subst | NO: | | subst | NO: | |
| L234A, | 696 | EPKSCDKTHTCPPCPAPEAAGGPSVFLFP | L234A, | 697 | EPKSSDKTHTCPPCPAPEAAGGPSVFLFPP |
| L235A, | | PKPKDTLMISRTPEVTCVVVDVSHEDPEV | L235A, | | KPKDTLMISRTPEVTCVVVDVSHEDPEVKF |
| P331S | | KFNWYVDGVEVHNAKTKPREEQYNSTYRV | P331S | | NWYVDGVEVHNAKTKPREEQYNSTYRVVSV |
| T366W | | VSVLTVLHQDWLNGKEYKCKVSNKALPAS | T366S, | | LTVLHQDWLNGKEYKCKVSNKALPASIEKT |
| | | IEKTISKAKGQPREPQVYTLPPSREEMTK | L368A, | | ISKAKGQPREPQVYTLPPSREEMTKNQVSL |
| | | NQVSLWCLVKGFYPSDIAVEWESNGQPEN | Y407V | | SCAVKGFYPSDIAVEWESNGQPENNYKTTP |
| | | NYKTTPPVLDSDGSFFLYSKLTVDKSRWQ | H435R, | | PVLDSDGSFFLVSKLTVDKSRWQQGNVFSC |
| | | QGNVFSCSVMHEALHNHYTQKSLSLSPGK | Y436F | | SVMHEALHNRFTQKSLSLSPGK |
| L234A, | 696 | EPKSCDKTHTCPPCPAPEAAGGPSVFLFP | L234A, | 698 | EPKSSDKTHTCPPCPAPEAAGGPSVFLFPP |
| L235A, | | PKPKDTLMISRTPEVTCVVVDVSHEDPEV | L235A, | | KPKDTLMISRTPEVTCVVVDVSHEDPEVKF |
| P331S | | KFNWYVDGVEVHNAKTKPREEQYNSTYRV | P331S | | NWYVDGVEVHNAKTKPREEQYNSTYRVVSV |
| T366W | | VSVLTVLHQDWLNGKEYKCKVSNKALPAS | T366S, | | LTVLHQDWLNGKEYKCKVSNKALPASIEKT |
| | | IEKTISKAKGQPREPQVYTLPPSREEMTK | L368A, | | ISKAKGQPREPQVYTLPPSREEMTKNQVSL |
| | | NQVSLWCLVKGFYPSDIAVEWESNGQPEN | Y407V | | SCAVKGFYPSDIAVEWESNGQPENNYKTTP |
| | | NYKTTPPVLDSDGSFFLYSKLTVDKSRWQ | H435R | | PVLDSDGSFFLVSKLTVDKSRWQQGNVFSC |
| | | QGNVFSCSVMHEALHNHYTQKSLSLSPGK | | | SVMHEALHNRYTQKSLSLSPGK |
| L234A, | 699 | EPKSCDKTHTCPPCPAPEAAGGPSVFLFP | L234A, | 700 | EPKSSDKTHTCPPCPAPEAAGGPSVFLFPP |
| L235A, | | PKPKDTLMISRTPEVTCVVVDVSHEDPEV | L235A, | | KPKDTLMISRTPEVTCVVVDVSHEDPEVKF |
| P331S | | KFNWYVDGVEVHNAKTKPREEQYNSTYRV | P331S | | NWYVDGVEVHNAKTKPREEQYNSTYRVVSV |
| T366S, | | VSVLTVLHQDWLNGKEYKCKVSNKALPAS | T366W | | LTVLHQDWLNGKEYKCKVSNKALPASIEKT |
| L368A, | | IEKTISKAKGQPREPQVYTLPPSREEMTK | | | ISKAKGQPREPQVYTLPPSREEMTKNQVSL |
| Y407V | | NQVSLSCAVKGFYPSDIAVEWESNGQPEN | | | WCLVKGFYPSDIAVEWESNGQPENNYKTTP |
| | | NYKTTPPVLDSDGSFFLVSKLTVDKSRWQ | | | PVLDSDGSFFLYSKLTVDKSRWQQGNVFSC |
| | | QGNVFSCSVMHEALHNHYTQKSLSLSPGK | | | SVMHEALHNHYTQKSLSLSPGK |
| L234A, | 701 | EPKSCDKTHTCPPCPAPEAAGGPSVFLFP | L234A, | 698 | EPKSSDKTHTCPPCPAPEAAGGPSVFLFPP |
| L235A, | | PKPKDTLMISRTPEVTCVVVDVSHEDPEV | L235A, | | KPKDTLMISRTPEVTCVVVDVSHEDPEVKF |
| P331S | | KFNWYVDGVEVHNAKTKPREEQYNSTYRV | P331S | | NWYVDGVEVHNAKTKPREEQYNSTYRVVSV |
| T366W | | VSVLTVLHQDWLNGKEYKCKVSNKALPAS | T366S, | | LTVLHQDWLNGKEYKCKVSNKALPASIEKT |
| M428L, | | IEKTISKAKGQPREPQVYTLPPSREEMTK | L368A, | | ISKAKGQPREPQVYTLPPSREEMTKNQVSL |
| N434S | | NQVSLWCLVKGFYPSDIAVEWESNGQPEN | Y407V | | SCAVKGFYPSDIAVEWESNGQPENNYKTTP |
| | | NYKTTPPVLDSDGSFFLYSKLTVDKSRWQ | H435R | | PVLDSDGSFFLVSKLTVDKSRWQQGNVFSC |
| | | QGNVFSCSVLHEALHSHYTQKSLSLSPGK | | | SVMHEALHNRYTQKSLSLSPGK |
| L234A, | 702 | SDKTHTCPPCPAPEAAGGPSVFLFPPKPK | L234A, | 703 | EPKSCDKTHTCPPCPAPEAAGGPSVFLFPP |
| L235A, | | DTLMISRTPEVTCVVVDVSHEDPEVKFNW | L235A, | | KPKDTLMISRTPEVTCVVVDVSHEDPEVKF |
| P331S | | YVDGVEVHNAKTKPREEQYNSTYRVVSVL | P331S | | NWYVDGVEVHNAKTKPREEQYNSTYRVVSV |
| T366W | | TVLHQDWLNGKEYKCKVSNKALPASIEKT | T366S, | | LTVLHQDWLNGKEYKCKVSNKALPASIEKT |
| M428L, | | ISKAKGQPREPQVYTLPPSREEMTKNQVS | L368A, | | ISKAKGQPREPQVYTLPPSREEMTKNQVSL |
| N434S | | LWCLVKGFYPSDIAVEWESNGQPENNYKT | Y407V | | SCAVKGFYPSDIAVEWESNGQPENNYKTTP |
| | | TPPVLDSDGSFFLYSKLTVDKSRWQQGNV | H435R | | PVLDSDGSFFLVSKLTVDKSRWQQGNVFSC |
| | | FSCSVLHEALHSHYTQKSLSLSPGK | | | SVMHEALHNRYTQKSLSLSPGK |
| L234A, | 704 | EPKSCDKTHTCPPCPAPEAAGGPSVFLFP | L234A, | 698 | EPKSSDKTHTCPPCPAPEAAGGPSVFLFPP |
| L235A, | | PKPKDTLYITREPEVTCVVVDVSHEDPEV | L235A, | | KPKDTLMISRTPEVTCVVVDVSHEDPEVKF |
| P331S | | KFNWYVDGVEVHNAKTKPREEQYNSTYRV | P331S | | NWYVDGVEVHNAKTKPREEQYNSTYRVVSV |
| T366W | | VSVLTVLHQDWLNGKEYKCKVSNKALPAS | T366S, | | LTVLHQDWLNGKEYKCKVSNKALPASIEKT |
| M252Y, | | IEKTISKAKGQPREPQVYTLPPSREEMTK | L368A, | | ISKAKGQPREPQVYTLPPSREEMTKNQVSL |
| S2541, | | NQVSLWCLVKGFYPSDIAVEWESNGQPEN | Y407V | | SCAVKGFYPSDIAVEWESNGQPENNYKTTP |
| T256E | | NYKTTPPVLDSDGSFFLYSKLTVDKSRWQ | H435R | | PVLDSDGSFFLVSKLTVDKSRWQQGNVFSC |
| | | QGNVFSCSVMHEALHNHYTQKSLSLSPGK | | | SVMHEALHNRYTQKSLSLSPGK |
| L234A, | 705 | SDKTHTCPPCPAPEAAGGPSVFLFPPKPK | L234A, | 703 | EPKSCDKTHTCPPCPAPEAAGGPSVFLFPP |
| L235A, | | DTLYITREPEVTCVVVDVSHEDPEVKFNW | L235A, | | KPKDTLMISRTPEVTCVVVDVSHEDPEVKF |
| P331S | | YVDGVEVHNAKTKPREEQYNSTYRVVSVL | P331S | | NWYVDGVEVHNAKTKPREEQYNSTYRVVSV |
| T366W | | TVLHQDWLNGKEYKCKVSNKALPASIEKT | T366S, | | LTVLHQDWLNGKEYKCKVSNKALPASIEKT |
| M252Y, | | ISKAKGQPREPQVYTLPPSREEMTKNQVS | L368A, | | ISKAKGQPREPQVYTLPPSREEMTKNQVSL |
| S2541, | | LWCLVKGFYPSDIAVEWESNGQPENNYKT | Y407V | | SCAVKGFYPSDIAVEWESNGQPENNYKTTP |
| T256E | | TPPVLDSDGSFFLYSKLTVDKSRWQQGNV | H435R | | PVLDSDGSFFLVSKLTVDKSRWQQGNVFSC |
| | | FSCSVMHEALHNHYTQKSLSLSPGK | | | SVMHEALHNRYTQKSLSLSPGK |
| L234A, | 706 | SDKTHTCPPCPAPEAAGGPSVFLFPPKPK | L234A, | 704 | EPKSCDKTHTCPPCPAPEAAGGPSVFLFPP |
| L235A, | | DTLMISRTPEVTCVVVDVSHEDPEVKFNW | L235A, | | KPKDTLYITREPEVTCVVVDVSHEDPEVKF |
| P331S | | YVDGVEVHNAKTKPREEQYNSTYRVVSVL | P331S | | NWYVDGVEVHNAKTKPREEQYNSTYRVVSV |
| T366S, | | TVLHQDWLNGKEYKCKVSNKALPASIEKT | T366W | | LTVLHQDWLNGKEYKCKVSNKALPASIEKT |
| L368A, | | ISKAKGQPREPQVYTLPPSREEMTKNQVS | M252Y, | | ISKAKGQPREPQVYTLPPSREEMTKNQVSL |
| Y407V | | LSCAVKGFYPSDIAVEWESNGQPENNYKT | S2541, | | WCLVKGFYPSDIAVEWESNGQPENNYKTTP |
| H435R | | TPPVLDSDGSFFLVSKLTVDKSRWQQGNV | T256E | | PVLDSDGSFFLYSKLTVDKSRWQQGNVFSC |
| | | FSCSVMHEALHNRYTQKSLSLSPGK | | | SVMHEALHNHYTQKSLSLSPGK |
| L234A, | 707 | SDKTHTCPPCPAPEAAGGPSVFLFPPKPK | L234A, | 703 | EPKSCDKTHTCPPCPAPEAAGGPSVFLFPP |
| L235A, | | DTLMISRTPEVTCVVVDVSHEDPEVKFNW | L235A, | | KPKDTLMISRTPEVTCVVVDVSHEDPEVKF |
| P331S + | | YVDGVEVHNAKTKPREEQYNSTYRVVSVL | P331S + | | NWYVDGVEVHNAKTKPREEQYNSTYRVVSV |
| T366W | | TVLHQDWLNGKEYKCKVSNKALPASIEKT | T366S, | | LTVLHQDWLNGKEYKCKVSNKALPASIEKT |
| | | ISKAKGQPREPQVYTLPPSREEMTKNQVS | L368A, | | ISKAKGQPREPQVYTLPPSREEMTKNQVSL |
| | | LWCLVKGFYPSDIAVEWESNGQPENNYKT | Y407V + | | SCAVKGFYPSDIAVEWESNGQPENNYKTTP |
| | | TPPVLDSDGSFFLYSKLTVDKSRWQQGNV | H435R | | PVLDSDGSFFLVSKLTVDKSRWQQGNVFSC |
| | | FSCSVMHEALHNHYTQKSLSLSPGK | | | SVMHEALHNRYTQKSLSLSPGK |
| L234A, | 708 | SDKTHTCPPCPAPEAAGGPSVFLFPPKPK | L234A, | 704 | EPKSCDKTHTCPPCPAPEAAGGPSVFLFPP |
| L235A, | | DTLYITREPEVTCVVVDVSHEDPEVKFNW | L235A, | | KPKDTLYITREPEVTCVVVDVSHEDPEVKF |
| P331S | | YVDGVEVHNAKTKPREEQYNSTYRVVSVL | P331S | | NWYVDGVEVHNAKTKPREEQYNSTYRVVSV |
| T366S, | | TVLHQDWLNGKEYKCKVSNKALPASIEKT | T366W | | LTVLHQDWLNGKEYKCKVSNKALPASIEKT |
| L368A, | | ISKAKGQPREPQVYTLPPSREEMTKNQVS | M252Y, | | ISKAKGQPREPQVYTLPPSREEMTKNQVSL |
| Y407V | | LSCAVKGFYPSDIAVEWESNGQPENNYKT | S2541, | | WCLVKGFYPSDIAVEWESNGQPENNYKTTP |
| M252Y, | | TPPVLDSDGSFFLVSKLTVDKSRWQQGNV | T256E | | PVLDSDGSFFLYSKLTVDKSRWQQGNVFSC |
| S2541, | | FSCSVMHEALHNHYTQKSLSLSPGK | | | SVMHEALHNHYTQKSLSLSPGK |
| T256E | | | | | |
| L234A, | 709 | EPKSSDKTHTCPPCPAPEAAGGPSVFLFP | L234A, | 710 | EPKSCDKTHTCPPCPAPEAAGGPSVFLFPP |
| L235A, | | PKPKDTLYITREPEVTCVVVDVSHEDPEV | L235A, | | KPKDTLYITREPEVTCVVVDVSHEDPEVKF |
| P331S | | KFNWYVDGVEVHNAKTKPREEQYNSTYRV | P331S | | NWYVDGVEVHNAKTKPREEQYNSTYRVVSV |
| T366S, | | VSVLTVLHQDWLNGKEYKCKVSNKALPAS | T366W | | LTVLHQDWLNGKEYKCKVSNKALPASIEKT |
| L368A, | | IEKTISKAKGQPREPQVYTLPPSREEMTK | M252Y | | ISKAKGQPREPQVYTLPPSREEMTKNQVSL |
| Y407V | | NQVSLWCLVKGFYPSDIAVEWESNGQPEN | S2541, | | SCAVKGFYPSDIAVEWESNGQPENNYKTTP |
| M252Y, | | NYKTTPPVLDSDGSFFLYSKLTVDKSRWQ | T256E | | PVLDSDGSFFLVSKLTVDKSRWQQGNVFSC |
| S2541, | | QGNVFSCSVMHEALHNHYTQKSLSLSPGK | | | SVMHEALHNHYTQKSLSLSPGK |
| T256E | | | | | |

[0201] In some embodiments, the multi-specific antigen binding molecule comprises a first antigen binding domain that is a scFv and a second antigen binding domain that is a Fab, wherein the first antigen binding domain comprises a first heavy chain (HC), and the second antigen binding domain comprises a second HC and a light chain (LC), the first HC, the second HC and the LC comprising the amino acid sequences set forth, respectively, or comprising amino acid sequences that are at least 80%, at least 85%, at least 90%, at least 91%, at least 92%, at least 93%, at least 94%, at least 95%, at least 96%, at least 97%, at least 98%, or at least 99% identical to the amino acid sequences set forth, respectively: SEQ ID NOs: 800, 801 and 802; SEQ ID NOs: 800, 803 and 802; SEQ ID NOs: 804, 803 and 802; SEQ ID NOs: 804, 805 and 802; SEQ ID NOs: 806, 801 and 802; SEQ ID NOs: 806, 803 and 802; SEQ ID NOs: 807, 803 and 802; SEQ ID NOs: 807, 805 and 802; SEQ ID NOs: 808, 809 and 802; SEQ ID NOs: 808, 810 and 802; SEQ ID NOs: 811, 801 and 802; SEQ ID NOs: 812, 809 and 802; SEQ ID NOs: 812, 810 and 802; SEQ ID NOs: 813, 805 and 802; SEQ ID NOs: 812, 814 and 802; SEQ ID NOs: 815, 801 and 802; SEQ ID NOs: 816, 805 and 802; SEQ ID NOs: 817, 801 and 802; SEQ ID NOs: 818, 805 and 802; SEQ ID NOs: 819, 810 and 802; SEQ ID NOs: 820, 810 and 802; SEQ ID NOs: 821, 822 and 823; SEQ ID NOs: 824, 825 and 823; SEQ ID NOs: 826, 825 and 823; SEQ ID NOs: 826, 827 and 823; SEQ ID NOs: 828, 829 and 823; SEQ ID NOs: 830, 822 and 823; SEQ ID NOs: 830, 825 and 823; SEQ ID NOs: 831, 825 and 823; SEQ ID NOs: 831, 827 and 823; SEQ ID NOs: 832, 833 and 823; SEQ ID NOs: 832, 829 and 823; SEQ ID NOs: 834, 827 and 823; SEQ ID NOs: 835, 829 and 823; SEQ ID NOs: 836, 829 and 823; SEQ ID NOs: 837, 833 and 823; SEQ ID NOs: 837, 838 and 823; SEQ ID NOs: 839, 840 and 823; SEQ ID NOs: 841, 829 and 823; SEQ ID NOs: 842, 829 and 823; SEQ ID NOs: 843, 829 and 823; SEQ ID NOs: 844, 829 and 823; SEQ ID NOs: 845, 829 and 823; SEQ ID NOs: 846, 829 and 823; SEQ ID NOs: 846, 833 and 823; SEQ ID NOs: 846, 838 and 823; SEQ ID NOs: 847, 827 and 823; SEQ ID NOs: 848, 829 and 823; SEQ ID NOs: 849, 829 and 823; SEQ ID NOs: 850, 829 and 823; SEQ ID NOs: 851, 829 and 823; SEQ ID NOs: 852, 829 and 823; SEQ ID NOs: 853, 829 and 823; SEQ ID NOs: 854, 829 and 823; SEQ ID NOs: 855, 829 and 823; SEQ ID NOs: 856, 829 and 823; SEQ ID NOs: 857, 829 and 823; SEQ ID NOs: 858, 829 and 823; SEQ ID NOs: 859, 829 and 823; SEQ ID NOs: 860, 829 and 823; SEQ ID NOs: 861, 862 and 863; SEQ ID NOs: 861, 864 and 863; SEQ ID NOs: 865, 864 and 863; SEQ ID NOs: 865, 866 and 863; SEQ ID NOs: 867, 868 and 863; SEQ ID NOs: 869, 862 and 863; SEQ ID NOs: 869, 864 and 863; SEQ ID NOs: 870, 864 and 863; SEQ ID NOs: 870, 866 and 863; SEQ ID NOs: 871, 872 and 863; SEQ ID NOs: 871, 868 and 863; SEQ ID NOs: 873, 862 and 863; SEQ ID NOs: 874, 866 and 863; SEQ ID NOs: 875, 872 and 863; SEQ ID NOs: 875, 868 and 863; SEQ ID NOs: 875, 876 and 863; SEQ ID NOs: 877, 862 and 863; SEQ ID NOs: 878, 866 and 863; SEQ ID NOs: 879, 862 and 863; SEQ ID NOs: 880, 866 and 863; SEQ ID NOs: 881, 882 and 883; SEQ ID NOs: 881, 884 and 883; SEQ ID NOs: 885, 884 and 883; SEQ ID NOs: 885, 886 and 883; SEQ ID NOs: 887, 888 and 883; SEQ ID NOs: 889, 882 and 883; SEQ ID NOs: 889, 884 and 883; SEQ ID NOs: 890, 884 and 883; SEQ ID NOs: 890, 886 and 883; SEQ ID NOs: 891, 892 and 883; SEQ ID NOs: 891, 888 and 883; SEQ ID NOs: 893, 882 and 883; SEQ ID NOs: 894, 886 and 883; SEQ ID NOs: 895, 892 and 883; SEQ ID NOs: 895, 888 and 883; SEQ ID NOs: 895, 896 and 883; SEQ ID NOs: 897, 882 and 883; SEQ ID NOs: 898, 886 and 883; SEQ ID NOs: 899, 882 and 883; or SEQ ID NOs: 900, 886 and 883.

[0202] In some embodiments, the multi-specific antigen binding molecule comprises a first antigen binding domain that is a scFv and a second antigen binding domain that is a Fab, wherein the first antigen binding domain comprises a first heavy chain (HC), and the second antigen binding domain comprises a second HC and a light chain (LC), the first HC, the second HC and the LC comprising the amino acid sequences set forth, respectively, or comprising amino acid sequences that are at least 80%, at least 85%, at least 90%, at least 91%, at least 92%, at least 93%, at least 94%, at least 95%, at least 96%, at least 97%, at least 98%, or at least 99% identical to the amino acid sequences set forth, respectively: SEQ ID NOs: 800, 801 and 802; SEQ ID NOs: 800, 803 and 802; SEQ ID NOs: 804, 803 and 802; SEQ ID NOs: 804, 805 and 802; SEQ ID NOs: 806, 801 and 802; SEQ ID NOs: 806, 803 and 802; SEQ ID NOs: 807, 803 and 802; SEQ ID NOs: 807, 805 and 802; SEQ ID NOs: 808, 809 and 802; SEQ ID NOs: 808, 810 and 802; SEQ ID NOs: 821, 822 and 823; SEQ ID NOs: 824, 825 and 823; SEQ ID NOs: 826, 825 and 823; SEQ ID NOs: 826, 827 and 823; SEQ ID NOs: 828, 829 and 823; SEQ ID NOs: 830, 822 and 823; SEQ ID NOs: 830, 825 and 823; SEQ ID NOs: 831, 825 and 823; SEQ ID NOs: 831, 827 and 823; SEQ ID NOs: 832, 833 and 823; SEQ ID NOs: 832, 829 and 823; SEQ ID NOs: 861, 862 and 863; SEQ ID NOs: 861, 864 and 863; SEQ ID NOs: 865, 864 and 863; SEQ ID NOs: 865, 866 and 863; SEQ ID NOs: 867, 868 and 863; SEQ ID NOs: 869, 862 and 863; SEQ ID NOs: 869, 864 and 863; SEQ ID NOs: 870, 864 and 863; SEQ ID NOs: 870, 866 and 863; SEQ ID NOs: 871, 872 and 863; SEQ ID NOs: 871, 868 and 863; SEQ ID NOs: 881, 882 and 883; SEQ ID NOs: 881, 884 and 883; SEQ ID NOs: 885, 884 and 883; SEQ ID NOs: 885, 886 and 883; SEQ ID NOs: 887, 888 and 883; SEQ ID NOs: 889, 882 and 883; SEQ ID NOs: 889, 884 and 883; SEQ ID NOs: 890, 884 and 883; SEQ ID NOs: 890, 886 and 883; SEQ ID NOs: 891, 892 and 883; or SEQ ID NOs: 891, 888 and 883.

[0203] In some embodiments, the multi-specific antigen binding molecule comprises a first antigen binding domain that is a scFv and a second antigen binding domain that is a Fab, wherein the first antigen binding domain comprises a first heavy chain (HC), and the second antigen binding domain comprises a second HC and a light chain (LC), the first HC, the second HC and the LC comprising the amino acid sequences set forth, respectively, or comprising amino acid sequences that are at least 80%, at least 85%, at least 90%, at least 91%, at least 92%, at least 93%, at least 94%, at least 95%, at least 96%, at least 97%, at least 98%, or at least 99% identical to the amino acid sequences set forth, respectively: SEQ ID NOs: 800, 801 and 802; SEQ ID NOs: 800, 803 and 802; SEQ ID NOs: 804, 803 and 802; SEQ ID NOs: 804, 805 and 802; SEQ ID NOs: 821, 822 and 823; SEQ ID NOs: 824, 825 and 823; SEQ ID NOs: 826, 825 and 823; SEQ ID NOs: 826, 827 and 823; SEQ ID NOs: 828, 829 and 823; SEQ ID NOs: 861, 862 and 863; SEQ ID NOs: 861, 864 and 863; SEQ ID NOs: 865, 864 and 863; SEQ ID NOs: 865, 866 and 863; SEQ ID NOs: 867, 868 and 863; SEQ ID NOs: 881, 882 and 883; SEQ ID NOs: 881, 884 and 883; SEQ ID NOs: 885, 884 and 883; SEQ ID NOs: 885, 886 and 883; or SEQ ID NOs: 887, 888 and 883.

[0204] In some embodiments, the multi-specific antigen binding molecule comprises a first antigen binding domain that is a scFv and a second antigen binding domain that is a Fab, wherein the first antigen binding domain comprises a first heavy chain (HC), and the second antigen binding domain comprises a second HC and a light chain (LC), the first HC, the second HC and the LC comprising the amino acid sequences set forth, respectively, or comprising amino acid sequences that are at least 80%, at least 85%, at least 90%, at least 91%, at least 92%, at least 93%, at least 94%, at least 95%, at least 96%, at least 97%, at least 98%, or at least 99% identical to the amino acid sequences set forth, respectively: SEQ ID NOs: 800, 801 and 802; SEQ ID NOs: 800, 803 and 802; SEQ ID NOs: 804, 803 and 802; SEQ ID NOs: 804, 805 and 802; SEQ ID NOs: 821, 822 and 823; SEQ ID NOs: 824, 825 and 823; SEQ ID NOs: 826, 825 and 823; SEQ ID NOs: 826, 827 and 823; SEQ ID NOs: 828, 829 and 823; SEQ ID NOs: 861, 862 and 863; SEQ ID NOs: 861, 864 and 863; SEQ ID NOs: 865, 864 and 863; SEQ ID NOs: 865, 866 and 863; or SEQ ID NOs: 867, 868 and 863.

[0205] In some embodiments, the multi-specific antigen binding molecule comprises a first antigen binding domain that is a Fab and a second antigen binding domain that is a scFv or an EC domain of CD4 wherein the first antigen binding domain comprises a first HC and a LC, and the second antigen binding domain comprises a second HC, the second HC, the first HC and the LC comprising the amino acid sequences set forth, respectively, or comprising amino acid sequences that are at least 80%, at least 85%, at least 90%, at least 91%, at least 92%, at least 93%, at least 94%, at least 95%, at least 96%, at least 97%, at least 98%, or at least 99% identical to the amino acid sequences set forth, respectively: SEQ ID NOs: 751, 752 and 753; SEQ ID NOs: 754, 752 and 753; SEQ ID NOs: 755, 756 and 753; SEQ ID NOs: 755, 757 and 753; SEQ ID NOs: 758, 757 and 753; SEQ ID NOs: 759, 756 and 753; SEQ ID NOs: 754, 760 and 761; SEQ ID NOs: 762, 760 and 761; SEQ ID NOs: 751, 763 and 753; SEQ ID NOs: 764, 752 and 753; SEQ ID NOs: 765, 752 and 753; SEQ ID NOs: 766, 767 and 753; SEQ ID NOs: 766, 768 and 753; SEQ ID NOs: 769, 768 and 753; SEQ ID NOs: 770, 767 and 753; SEQ ID NOs: 765, 771 and 761; SEQ ID NOs: 772, 771 and 761; SEQ ID NOs: 774, 775 and 776; SEQ ID NOs: 777, 778 and 776; SEQ ID NOs: 779, 778 and 776; SEQ ID NOs: 779, 780 and 776; SEQ ID NOs: 777, 781 and 776; SEQ ID NOs: 782, 752 and 753; SEQ ID NOs: 783, 752 and 753; SEQ ID NOs: 784, 785 and 753; SEQ ID NOs: 784, 786 and 753; SEQ ID NOs: 787, 786 and 753; SEQ ID NOs: 788, 785 and 753; SEQ ID NOs: 783, 789 and 761; SEQ ID NOs: 790, 789 and 761; SEQ ID NOs: 792, 793 and 794; SEQ ID NOs: 795, 796 and 794; SEQ ID NOs: 797, 796 and 794; SEQ ID NOs: 797, 798 and 794; or SEQ ID NOs: 795, 799 and 794.

[0206] In some embodiments, the multi-specific antigen binding molecule comprises a first antigen binding domain that is a Fab and a second antigen binding domain that is a scFv or an EC domain of CD4 wherein the first antigen binding domain comprises a first HC and a LC, and the second antigen binding domain comprises a second HC, the second HC, the first HC and the LC comprising the amino acid sequences set forth, respectively, or comprising amino acid sequences that are at least 80%, at least 85%, at least 90%, at least 91%, at least 92%, at least 93%, at least 94%, at least 95%, at least 96%, at least 97%, at least 98%, or at least 99% identical to the amino acid sequences set forth, respectively: SEQ ID NOs: 751, 752 and 753; SEQ ID NOs: 754, 752 and 753; SEQ ID NOs: 755, 756 and 753; SEQ ID NOs: 755, 757 and 753; SEQ ID NOs: 758, 757 and 753; SEQ ID NOs: 759, 756 and 753; SEQ ID NOs: 764, 752 and 753; SEQ ID NOs: 765, 752 and 753; SEQ ID NOs: 766, 767 and 753; SEQ ID NOs: 766, 768 and 753; SEQ ID NOs: 769, 768 and 753; SEQ ID NOs: 770, 767 and 753; SEQ ID NOs: 777, 778 and 776; SEQ ID NOs: 779, 778 and 776; SEQ ID NOs: 779, 780 and 776; SEQ ID NOs: 777, 781 and 776; SEQ ID NOs: 782, 752 and 753; SEQ ID NOs: 783, 752 and 753; SEQ ID NOs: 784, 785 and 753; SEQ ID NOs: 784, 786 and 753; SEQ ID NOs: 787, 786 and 753; SEQ ID NOs: 788, 785 and 753; SEQ ID NOs: 795, 796 and 794; SEQ ID NOs: 797, 796 and 794; SEQ ID NOs: 797, 798 and 794; or SEQ ID NOs: 795, 799 and 794.

[0207] In some embodiments, the multi-specific antigen binding molecule comprises a first antigen binding domain that is a Fab and a second antigen binding domain that is a scFv or an EC domain of CD4 wherein the first antigen binding domain comprises a first HC and a LC, and the second antigen binding domain comprises a second HC, the second HC, the first HC and the LC comprising the amino acid sequences set forth, respectively, or comprising amino acid sequences that are at least 80%, at least 85%, at least 90%, at least 91%, at least 92%, at least 93%, at least 94%, at least 95%, at least 96%, at least 97%, at least 98%, or at least 99% identical to the amino acid sequences set forth, respectively: SEQ ID NOs: 751, 752 and 753; SEQ ID NOs: 754, 752 and 753; SEQ ID NOs: 755, 756 and 753; SEQ ID NOs: 755, 757 and 753; SEQ ID NOs: 758, 757 and 753; or SEQ ID NOs: 759, 756 and 753.

[0208] In some embodiments, the multi-specific antigen binding molecule comprises a first antigen binding domain that is a Fab and a second antigen binding domain that is a scFv or an EC domain of CD4 wherein the first antigen binding domain comprises a first HC and a LC, and the second antigen binding domain comprises a second HC, the second HC, the first HC and the LC comprising the amino acid sequences set forth, respectively, or comprising amino acid sequences that are at least 80%, at least 85%, at least 90%, at least 91%, at least 92%, at least 93%, at least 94%, at least 95%, at least 96%, at least 97%, at least 98%, or at least 99% identical to the amino acid sequences set forth, respectively: SEQ ID NOs: 751, 752 and 753; or SEQ ID NOs: 755, 756 and 753. In some embodiments, the multi-specific antigen binding molecule comprises a first antigen binding domain that is a Fab and a second antigen binding domain that is a scFv or an EC domain of CD4 wherein the first antigen binding domain comprises a first HC and a LC, and the second antigen binding domain comprises a second HC, the second HC, the first HC and the LC comprising the amino acid sequences set forth, respectively, or comprising amino acid sequences that are at least 80%, at least 85%, at least 90%, at least 91%, at least 92%, at least 93%, at least 94%, at least 95%, at least 96%, at least 97%, at least 98%, or at least 99% identical to the amino acid sequences set forth, respectively: SEQ ID NOs: 751, 752 and 753. In some embodiments, the multi-specific antigen binding molecule comprises a first antigen binding domain that is a Fab and a second antigen binding domain that is a scFv or an EC domain of CD4 wherein the first antigen binding domain comprises a first HC and a LC, and the second antigen binding domain comprises a second HC, the second HC, the first HC and the LC comprising the amino acid sequences set forth, respectively, or comprising amino acid sequences that are at least 80%, at least 85%, at least 90%, at least 91%, at least 92%, at least 93%, at least 94%, at least 95%, at least 96%, at least 97%, at least 98%, or at least 99% identical to the amino acid sequences set forth, respectively: SEQ ID NOs: 755, 756 and 753. In various embodiments, the multi-specific antigen binding molecule has a potency, as measured by EC50, of less than 0.15 μg/mL, e.g., less than 0.14 μg/mL, 0.13 μg/mL, 0.12 μg/mL or 0.11 μg/mL, or less, against at least 30 different HIV isolates. In some embodiments, the multi-specific antigen binding molecule has a potency, as measured by EC50, of less than 0.11 μg/mL against at least 30 different HIV isolates.

[0209] In some embodiments, the multi-specific antigen binding molecule comprises a first antigen binding domain that is a Fab and a second antigen binding domain that is an EC domain of CD4 wherein the first antigen binding domain comprises a first HC and a LC, and the second antigen binding domain comprises a second HC, the second HC, the first HC and the LC comprising amino acid sequences that are at least 80%, at least 85%, at least 90%, at least 91%, at least 92%, at least 93%, at least 94%, at least 95%, at least 96%, at least 97%, at least 98%, or at least 99% identical to the amino acid sequences set forth, respectively: SEQ ID NOs: 751, 752 and 753. In some embodiments, the multi-specific antigen binding molecule comprises a first antigen binding domain that is a Fab and a second antigen binding domain that is an EC domain of CD4 wherein the first antigen binding domain comprises a first HC and a LC, and the second antigen binding domain comprises a second HC, the second HC, the first HC and the LC comprising amino acid sequences that are at least 95% identical to the amino acid sequences set forth, respectively: SEQ ID NOs: 751, 752 and 753. In some embodiments, the multi-specific antigen binding molecule comprises a first antigen binding domain that is a Fab and a second antigen binding domain that is an EC domain of CD4 wherein the first antigen binding domain comprises a first HC and a LC, and the second antigen binding domain comprises a second HC, the second HC, the first HC and the LC comprising amino acid sequences that are at least 99% identical to the amino acid sequences set forth, respectively: SEQ ID NOs: 751, 752 and 753. In some embodiments, the multi-specific antigen binding molecule comprises a first antigen binding domain that is a Fab and a second antigen binding domain that is an EC domain of CD4 wherein the first antigen binding domain comprises a first HC and a LC, and the second antigen binding domain comprises a second HC, the second HC comprising an amino acid sequence that is at least 95% (e.g., at least 96%, at least 97%, at least 98%, or at least 99%) identical to the amino acid sequence of SEQ ID NO: 751, and the first HC and the LC comprising amino acid sequences that are at least 95% (e.g., at least 96%, at least 97%, at least 98%, or at least 99%) identical to the amino acid sequences set forth, respectively: SEQ ID NOs: 752 and 753.

[0210] In some embodiments, the multi-specific antigen binding molecule comprises a first antigen binding domain that is a Fab and a second antigen binding domain that is an EC domain of CD4 wherein the first antigen binding domain comprises a first HC and a LC, and the second antigen binding domain comprises a second HC, the second HC comprising an amino acid sequence that is at least 95% (e.g., at least 96%, at least 97%, at least 98%, or at least 99%) identical to the amino acid sequence of SEQ ID NO: 751, the first HC comprises an amino acid sequence that is at least 95% (e.g., at least 96%, at least 97%, at least 98%, or at least 99%) identical to the amino acid sequence of SEQ ID NO: 752, and the LC comprises an amino acid sequence that is at least 95% (e.g., at least 96%, at least 97%, at least 98%, or at least 99%) identical to the amino acid sequence of SEQ ID NO: 753. In some embodiments, the multi-specific antigen binding molecule comprises a first antigen binding domain that is a Fab and a second antigen binding domain that is an EC domain of CD4 wherein the first antigen binding domain comprises a first HC and a LC, and the second antigen binding domain comprises a second HC, the second HC comprising an amino acid sequence that is at least 95% (e.g., at least 96%, at least 97%, at least 98%, or at least 99%) identical to the amino acid sequence of SEQ ID NO: 751, the first HC comprises an amino acid sequence of SEQ ID NO: 752, and the LC comprises an amino acid sequence that is at least 95% identical to the amino acid sequence of SEQ ID NO: 753. In some embodiments, the multi-specific antigen binding molecule comprises a first antigen binding domain that is a Fab and a second antigen binding domain that is an EC domain of CD4 wherein the first antigen binding domain comprises a first HC and a LC, and the second antigen binding domain comprises a second HC, the second HC comprising an amino acid sequence that is at least 95% (e.g., at least 96%, at least 97%, at least 98%, or at least 99%) identical to the amino acid sequence of SEQ ID NO: 751, the first HC comprises an amino acid sequence of SEQ ID NO: 752, and the LC comprises an amino acid sequence that is at least 99% identical to the amino acid sequence of SEQ ID NO: 753. In some embodiments, the multi-specific antigen binding molecule comprises a first antigen binding domain that is a Fab and a second antigen binding domain that is an EC domain of CD4 wherein the first antigen binding domain comprises a first HC and a LC, and the second antigen binding domain comprises a second HC, the second HC comprising an amino acid sequence that is at least 95% (e.g., at least 96%, at least 97%, at least 98%, or at least 99%) identical to the amino acid sequence of SEQ ID NO: 751, the first HC comprises an amino acid sequence that is at least 95% identical to the amino acid sequence of SEQ ID NO: 752, and the LC comprises an amino acid sequence of SEQ ID NO: 753. In some embodiments, the multi-specific antigen binding molecule comprises a first antigen binding domain that is a Fab and a second antigen binding domain that is an EC domain of CD4 wherein the first antigen binding domain comprises a first HC and a LC, and the second antigen binding domain comprises a second HC, the second HC comprising an amino acid sequence that is at least 95% (e.g., at least 96%, at least 97%, at least 98%, or at least 99%) identical to the amino acid sequence of SEQ ID NO: 751, the first HC comprises an amino acid sequence that is at least 99% identical to the amino acid sequence of SEQ ID NO: 752, and the LC comprises an amino acid sequence of SEQ ID NO: 753. In some embodiments, the multi-specific antigen binding molecule comprises a first antigen binding domain that is a Fab and a second antigen binding domain that is an EC domain of CD4 wherein the first antigen binding domain comprises a first HC and a LC, and the second antigen binding domain comprises a second HC, the second HC, the first HC and the LC comprising amino acid sequences set forth, respectively: SEQ ID NOs: 751, 752 and 753.

[0211] Illustrative sequences of bispecific molecules targeting CD3 and HIV gp120, described herein, are provided in Table G. Bispecific molecules described herein are summarized in Table 53.

TABLE G
amino acid sequences of illustrative CD3/gp120-targeting bi-specific binding molecules

| Ab name/ | | | Fab Arm - LC |
|---|---|---|---|
| features | unpaired HC | Fab Arm - HC (VH-Fc) | (VL-CL) |
| 180 | SEQ ID NO: 751 | SEQ ID NO: 752 | SEQ ID NO: 753 |
| hCD4 | KKVVYGKKGDTVELTCTASQKKNIQFHWKNS | EVQLVESGGGLVQPGGSLRLSCAASGFTFNTYAMN | QAVVTQEPSLTVSPGG |
| D1.22 Fc | NQIKILGNQGSFLTKGPSKLNDRVDSRRSLW | WVRQAPGKGLEWVGRIRSKYNNYATYYADSVKSRF | TVTLTCGSSTGAVTTG |
| AAS + W + | DQGNFPLIIKNLKPEDSDTYICEVEDQKEEV | TISRDDSKNSLYLEMNSLRTEDTAVYYCVRHGNFG | HYANWVQQKPGQAPRG |
| YTE/ | QLVVVGGSDKTHTCPPCPAPEAAGGPSVFLF | HSYVSWFAYWGQGTLVTVSSASTKGPSVFPLAPSS | LIGGTSNRAPGVPARF |
| huSP34.39.13 | PPKPKDTLYITREPEVTCVVVDVSHEDPEVK | KSTSGGTAALGCLVKDYFPEPVTVSWNSGALTSGV | SGSLLGGKAALTISGA |
| AAS + SAV + | FNWYVDGVEVHNAKTKPREEQYNSTYRVVSV | HTFPAVLQSSGLYSLSSVVTVPSSSLGTQTYICNV | QPEDEAEYYCALWYSN |
| R | LTVLHQDWLNGKEYKCKVSNKALPASIEKTI | NHKPSNTKVDKKVEPKSCDKTHTCPPCPAPEAAGG | RWVFGGGTKLTVLGQP |
| | SKAKGQPREPQVYTLPPSREEMTKNQVSLWC | PSVFLFPPKPKDTLMISRTPEVICVVVDVSHEDPE | KAAPSVTLFPPSSEEL |
| | LVKGFYPSDIAVEWESNGQPENNYKTTPPVL | VKFNWYVDGVEVHNAKTKPREEQYNSTYRVVSVLT | QANKATLVCLISDFYP |
| | DSDGSFFLYSKLTVDKSRWQQGNVFSCSVMH | VLHQDWLNGKEYKCKVSNKALPASIEKTISKAKGQ | GAVTVAWKADSSPVKA |
| | EALHNHYTQKSLSLSPGK | PREPQVYTLPPSREEMTKNQVSLSCAVKGFYPSDI | GVETTTPSKQSNNKYA |
| | | AVEWESNGQPENNYKTTPPVLDSDGSFFLVSKLTV | ASSYLSLTPEQWKSHR |
| | | DKSRWQQGNVFSCSVMHEALHNRYTQKSLSLSPGK | SYSCQVTHEGSTVEKT |
| | | | VAPTECS |
| 181 | SEQ ID NO: 754 | SEQ ID NO: 752 | SEQ ID NO: 753 |
| hCD4 | KKVVYGKKGDTVELTCTASQKKNIQFHWKNS | EVQLVESGGGLVQPGGSLRLSCAASGFTFNTYAMN | QAVVTQEPSLTVSPGG |
| D1.22 Fc | NQIKILGNQGSFLTKGPSKLNDRVDSRRSLW | WVRQAPGKGLEWVGRIRSKYNNYATYYADSVKSRF | TVTLTCGSSTGAVTTG |
| AAS + W/ | DQGNFPLIIKNLKPEDSDTYICEVEDQKEEV | TISRDDSKNSLYLEMNSLRTEDTAVYYCVRHGNFG | HYANWVQQKPGQAPRG |
| huSP34.39.13 | QLVVVGGSDKTHTCPPCPAPEAAGGPSVFLF | HSYVSWFAYWGQGTLVTVSSASTKGPSVFPLAPSS | LIGGTSNRAPGVPARF |
| AAS + SAV + | PPKPKDTLMISRTPEVTCVVVDVSHEDPEVK | KSTSGGTAALGCLVKDYFPEPVTVSWNSGALTSGV | SGSLLGGKAALTISGA |
| R | FNWYVDGVEVHNAKTKPREEQYNSTYRVVSV | HTFPAVLQSSGLYSLSSVVTVPSSSLGTQTYICNV | QPEDEAEYYCALWYSN |
| | LTVLHQDWLNGKEYKCKVSNKALPASIEKTI | NHKPSNTKVDKKVEPKSCDKTHTCPPCPAPEAAGG | RWVFGGGTKLTVLGQP |
| | SKAKGQPREPQVYTLPPSREEMTKNQVSLWC | PSVFLFPPKPKDTLMISRTPEVTOVVVDVSHEDPE | KAAPSVTLFPPSSEEL |
| | LVKGFYPSDIAVEWESNGQPENNYKTTPPVL | VKFNWYVDGVEVHNAKTKPREEQYNSTYRVVSVLT | QANKATLVCLISDFYP |
| | DSDGSFFLYSKLTVDKSRWQQGNVFSCSVMH | VLHQDWLNGKEYKCKVSNKALPASIEKTISKAKGQ | GAVTVAWKADSSPVKA |
| | EALHNHYTQKSLSLSPGK | PREPQVYTLPPSREEMTKNQVSLSCAVKGFYPSDI | GVETTTPSKQSNNKYA |
| | | AVEWESNGQPENNYKTTPPVLDSDGSFFLVSKLTV | ASSYLSLTPEQWKSHR |
| | | DKSRWQQGNVFSCSVMHEALHNRYTQKSLSLSPGK | SYSCQVTHEGSTVEKT |
| | | | VAPTECS |
| 182 | SEQ ID NO: 755 | SEQ ID NO: 756 | SEQ ID NO: 753 |
| hCD4 | KKVVYGKKGDTVELTCTASQKKNIQFHWKNS | EVQLVESGGGLVQPGGSLRLSCAASGFTFNTYAMN | QAVVTQEPSLTVSPGG |
| D1.22 Fc | NQIKILGNQGSFLTKGPSKLNDRVDSRRSLW | WVRQAPGKGLEWVGRIRSKYNNYATYYADSVKGRF | TVTLTCGSSTGAVTTG |
| AAS + SAV + | DQGNFPLIIKNLKPEDSDTYICEVEDQKEEV | TISRDDSKNSLYLQMNSLRTEDTAVYYCVRHGNFG | HYANWVQQKPGQAPRG |
| R/ | QLVVVGGSDKTHTCPPCPAPEAAGGPSVFLF | HSYVSWFAYWGQGTLVTVSSASTKGPSVFPLAPSS | LIGGTSNRAPGVPARF |
| huSP34.3.13 | PPKPKDTLMISRTPEVTCVVVDVSHEDPEVK | KSTSGGTAALGCLVKDYFPEPVTVSWNSGALTSGV | SGSLLGGKAALTISGA |
| AAS + W + | FNWYVDGVEVHNAKTKPREEQYNSTYRVVSV | HTFPAVLQSSGLYSLSSVVTVPSSSLGTQTYICNV | QPEDEAEYYCALWYSN |
| YTE | LTVLHQDWLNGKEYKCKVSNKALPASIEKTI | NHKPSNTKVDKKVEPKSCDKTHTCPPCPAPEAAGG | RWVFGGGTKLTVLGQP |
| | SKAKGQPREPQVYTLPPSREEMTKNQVSLSC | PSVFLFPPKPKDTLYITREPEVTOVVVDVSHEDPE | KAAPSVTLFPPSSEEL |
| | AVKGFYPSDIAVEWESNGQPENNYKTTPPVL | VKFNWYVDGVEVHNAKTKPREEQYNSTYRVVSVLT | QANKATLVCLISDFYP |
| | DSDGSFFLVSKLTVDKSRWQQGNVFSCSVMH | VLHQDWLNGKEYKCKVSNKALPASIEKTISKAKGQ | GAVTVAWKADSSPVKA |
| | EALHNRYTQKSLSLSPGK | PREPQVYTLPPSREEMTKNQVSLWCLVKGFYPSDI | GVETTTPSKQSNNKYA |
| | | AVEWESNGQPENNYKTTPPVLDSDGSFFLYSKLTV | ASSYLSLTPEQWKSHR |
| | | DKSRWQQGNVFSCSVMHEALHNHYTQKSLSLSPGK | SYSCQVTHEGSTVEKT |
| | | | VAPTECS |
| 183 | SEQ ID NO: 755 | SEQ ID NO: 757 | SEQ ID NO: 753 |
| hCD4 | KKVVYGKKGDTVELTCTASQKKNIQFHWKNS | EVQLVESGGGLVQPGGSLRLSCAASGFTFNTYAMN | QAVVTQEPSLTVSPGG |
| D1.22 Fc | NQIKILGNQGSFLTKGPSKLNDRVDSRRSLW | WVRQAPGKGLEWVGRIRSKYNNYATYYADSVKGRF | TVTLTCGSSTGAVTTG |
| AAS + SAV + | DQGNFPLIIKNLKPEDSDTYICEVEDQKEEV | TISRDDSKNSLYLQMNSLRTEDTAVYYCVRHGNFG | HYANWVQQKPGQAPRG |
| R/ | QLVVVGGSDKTHTCPPCPAPEAAGGPSVFLF | HSYVSWFAYWGQGTLVTVSSASTKGPSVFPLAPSS | LIGGTSNRAPGVPARF |
| huSP34.3.13 | PPKPKDTLMISRTPEVTCVVVDVSHEDPEVK | KSTSGGTAALGCLVKDYFPEPVTVSWNSGALTSGV | SGSLLGGKAALTISGA |
| AAS + W | FNWYVDGVEVHNAKTKPREEQYNSTYRVVSV | HTFPAVLQSSGLYSLSSVVTVPSSSLGTQTYICNV | QPEDEAEYYCALWYSN |
| | LTVLHQDWLNGKEYKCKVSNKALPASIEKTI | NHKPSNTKVDKKVEPKSCDKTHTCPPCPAPEAAGG | RWVFGGGTKLTVLGQP |
| | SKAKGQPREPQVYTLPPSREEMTKNQVSLSC | PSVFLFPPKPKDTLMISRTPEVICVVVDVSHEDPE | KAAPSVTLFPPSSEEL |
| | AVKGFYPSDIAVEWESNGQPENNYKTTPPVL | VKFNWYVDGVEVHNAKTKPREEQYNSTYRVVSVLT | QANKATLVCLISDFYP |
| | DSDGSFFLVSKLTVDKSRWQQGNVFSCSVMH | VLHQDWLNGKEYKCKVSNKALPASIEKTISKAKGQ | GAVTVAWKADSSPVKA |
| | EALHNRYTQKSLSLSPGK | PREPQVYTLPPSREEMTKNQVSLWCLVKGFYPSDI | GVETTTPSKQSNNKYA |
| | | AVEWESNGQPENNYKTTPPVLDSDGSFFLYSKLTV | ASSYLSLTPEQWKSHR |
| | | DKSRWQQGNVFSCSVMHEALHNHYTQKSLSLSPGK | SYSCQVTHEGSTVEKT |
| | | | VAPTECS |
| 184 | SEQ ID NO: 758 | SEQ ID NO: 757 | SEQ ID NO: 753 |
| hCD4 | KKVVYGKKGDTVELTCTASQKKNIQFHWKNS | EVQLVESGGGLVQPGGSLRLSCAASGFTFNTYAMN | QAVVTQEPSLTVSPGG |
| D1.22 Fc | NQIKILGNQGSFLTKGPSKLNDRVDSRRSLW | WVRQAPGKGLEWVGRIRSKYNNYATYYADSVKGRF | TVTLTCGSSTGAVTTG |
| AAS + SAV/ | DQGNFPLIIKNLKPEDSDTYICEVEDQKEEV | TISRDDSKNSLYLQMNSLRTEDTAVYYCVRHGNFG | HYANWVQQKPGQAPRG |
| huSP34.3.13 | QLVVVGGSDKTHTCPPCPAPEAAGGPSVFLF | HSYVSWFAYWGQGTLVTVSSASTKGPSVFPLAPSS | LIGGTSNRAPGVPARF |
| AAS + W | PPKPKDTLMISRTPEVTCVVVDVSHEDPEVK | KSTSGGTAALGCLVKDYFPEPVTVSWNSGALTSGV | SGSLLGGKAALTISGA |
| | FNWYVDGVEVHNAKTKPREEQYNSTYRVVSV | HTFPAVLQSSGLYSLSSVVTVPSSSLGTQTYICNV | QPEDEAEYYCALWYSN |
| | LTVLHQDWLNGKEYKCKVSNKALPASIEKTI | NHKPSNTKVDKKVEPKSCDKTHTCPPCPAPEAAGG | RWVFGGGTKLTVLGQP |
| | SKAKGQPREPQVYTLPPSREEMTKNQVSLSC | PSVFLFPPKPKDTLMISRTPEVTOVVVDVSHEDPE | KAAPSVTLFPPSSEEL |
| | AVKGFYPSDIAVEWESNGQPENNYKTTPPVL | VKFNWYVDGVEVHNAKTKPREEQYNSTYRVVSVLT | QANKATLVCLISDFYP |
| | DSDGSFFLVSKLTVDKSRWQQGNVFSCSVMH | VLHQDWLNGKEYKCKVSNKALPASIEKTISKAKGQ | GAVTVAWKADSSPVKA |
| | EALHNHYTQKSLSLSPGK | PREPQVYTLPPSREEMTKNQVSLWCLVKGFYPSDI | GVETTTPSKQSNNKYA |
| | | AVEWESNGQPENNYKTTPPVLDSDGSFFLYSKLTV | ASSYLSLTPEQWKSHR |
| | | DKSRWQQGNVFSCSVMHEALHNHYTQKSLSLSPGK | SYSCQVTHEGSTVEKT |
| | | | VAPTECS |
| 185 | SEQ ID NO: 759 | SEQ ID NO: 756 | SEQ ID NO: 753 |
| hCD4 | KKVVYGKKGDTVELTCTASQKKNIQFHWKNS | EVQLVESGGGLVQPGGSLRLSCAASGFTFNTYAMN | QAVVTQEPSLTVSPGG |
| D1.22 Fc | NQIKILGNQGSFLTKGPSKLNDRVDSRRSLW | WVRQAPGKGLEWVGRIRSKYNNYATYYADSVKGRF | TVTLTCGSSTGAVTTG |
| AAS + SAV + | DQGNFPLIIKNLKPEDSDTYICEVEDQKEEV | TISRDDSKNSLYLQMNSLRTEDTAVYYCVRHGNFG | HYANWVQQKPGQAPRG |
| YTE/ | QLVVVGGSDKTHTCPPCPAPEAAGGPSVFLF | HSYVSWFAYWGQGTLVTVSSASTKGPSVFPLAPSS | LIGGTSNRAPGVPARF |
| huSP34.3.13 | PPKPKDTLYITREPEVTCVVVDVSHEDPEVK | KSTSGGTAALGCLVKDYFPEPVTVSWNSGALTSGV | SGSLLGGKAALTISGA |
| AAS + W + | FNWYVDGVEVHNAKTKPREEQYNSTYRVVSV | HTFPAVLQSSGLYSLSSVVTVPSSSLGTQTYICNV | QPEDEAEYYCALWYSN |
| YTE | LTVLHQDWLNGKEYKCKVSNKALPASIEKTI | NHKPSNTKVDKKVEPKSCDKTHTCPPCPAPEAAGG | RWVFGGGTKLTVLGQP |
| | SKAKGQPREPQVYTLPPSREEMTKNQVSLSC | PSVFLFPPKPKDTLYITREPEVTOVVVDVSHEDPE | KAAPSVTLFPPSSEEL |
| | AVKGFYPSDIAVEWESNGQPENNYKTTPPVL | VKFNWYVDGVEVHNAKTKPREEQYNSTYRVVSVLT | QANKATLVCLISDFYP |
| | DSDGSFFLVSKLTVDKSRWQQGNVFSCSVMH | VLHQDWLNGKEYKCKVSNKALPASIEKTISKAKGQ | GAVTVAWKADSSPVKA |
| | EALHNHYTQKSLSLSPGK | PREPQVYTLPPSREEMTKNQVSLWCLVKGFYPSDI | GVETTTPSKQSNNKYA |
| | | AVEWESNGQPENNYKTTPPVLDSDGSFFLYSKLTV | ASSYLSLTPEQWKSHR |
| | | DKSRWQQGNVFSCSVMHEALHNHYTQKSLSLSPGK | SYSCQVTHEGSTVEKT |
| | | | VAPTECS |
| 186 | SEQ ID NO: 754 | SEQ ID NO: 760 | SEQ ID NO: 761 |
| CD4 | KKVVYGKKGDTVELTCTASQKKNIQFHWKNS | EVQLVESGGGLVQPGGSLRLSCAASGFTFNTYAMN | QAVVTQEPSLTVSPGG |
| D1.22 Fc | NQIKILGNQGSFLTKGPSKLNDRVDSRRSLW | WVRQAPGKGLEWVGRIRSKYNNYATYYAASVKGRF | TVTLTCGSSTGAVTTG |
| AAS + W/ | DQGNFPLIIKNLKPEDSDTYICEVEDQKEEV | TISRDDSKNSLYLQMNSLKTEDTAMYYCVRHGNFG | HYANWVQQKPGQAPRG |
| huSP34.1.3 | QLVVVGGSDKTHTCPPCPAPEAAGGPSVFLF | NSYVSWFAYWGQGTLVTVSSASTKGPSVFPLAPSS | LIGGTNKRAPWTPARF |
| AAS + SAV + | PPKPKDTLMISRTPEVTCVVVDVSHEDPEVK | KSTSGGTAALGCLVKDYFPEPVTVSWNSGALTSGV | SGSLLGGKAALTLSGA |
| R | FNWYVDGVEVHNAKTKPREEQYNSTYRVVSV | HTFPAVLQSSGLYSLSSVVTVPSSSLGTQTYICNV | QPEDEAEYYCALWYSN |
| | LTVLHQDWLNGKEYKCKVSNKALPASIEKTI | NHKPSNTKVDKKVEPKSCDKTHTCPPCPAPEAAGG | LWVFGGGTKLTVLGQP |
| | SKAKGQPREPQVYTLPPSREEMTKNQVSLWC | PSVFLFPPKPKDTLMISRTPEVICVVVDVSHEDPE | KAAPSVTLFPPSSEEL |
| | LVKGFYPSDIAVEWESNGQPENNYKTTPPVL | VKFNWYVDGVEVHNAKTKPREEQYNSTYRVVSVLT | QANKATLVCLISDFYP |
| | DSDGSFFLYSKLTVDKSRWQQGNVFSCSVMH | VLHQDWLNGKEYKCKVSNKALPASIEKTISKAKGQ | GAVTVAWKADSSPVKA |
| | EALHNHYTQKSLSLSPGK | PREPQVYTLPPSREEMTKNQVSLSCAVKGFYPSDI | GVETTTPSKQSNNKYA |
| | | AVEWESNGQPENNYKTTPPVLDSDGSFFLVSKLTV | ASSYLSLTPEQWKSHR |
| | | DKSRWQQGNVFSCSVMHEALHNRYTQKSLSLSPGK | SYSCQVTHEGSTVEKT |
| | | | VAPTECS |
| 187 | SEQ ID NO: 762 | SEQ ID NO: 760 | SEQ ID NO: 761 |
| hCD4 | KKVVYGKKGDTVELTCTASQKKNIQFHWKNS | EVQLVESGGGLVQPGGSLRLSCAASGFTFNTYAMN | QAVVTQEPSLTVSPGG |
| D1.22 Fc | NQIKILGNQGSFLTKGPSKLNDRVDSRRSLW | WVRQAPGKGLEWVGRIRSKYNNYATYYAASVKGRF | TVTLTCGSSTGAVTTG |
| AAS + W + | DQGNFPLIIKNLKPEDSDTYICEVEDQKEEV | TISRDDSKNSLYLQMNSLKTEDTAMYYCVRHGNFG | HYANWVQQKPGQAPRG |
| LS/ | QLVVVGGSDKTHTCPPCPAPEAAGGPSVFLF | NSYVSWFAYWGQGTLVTVSSASTKGPSVFPLAPSS | LIGGTNKRAPWTPARF |
| huSP34.1.3 | PPKPKDTLMISRTPEVTCVVVDVSHEDPEVK | KSTSGGTAALGCLVKDYFPEPVTVSWNSGALTSGV | SGSLLGGKAALTLSGA |
| AAS + SAV + | FNWYVDGVEVHNAKTKPREEQYNSTYRVVSV | HTFPAVLQSSGLYSLSSVVTVPSSSLGTQTYICNV | QPEDEAEYYCALWYSN |
| R | LTVLHQDWLNGKEYKCKVSNKALPASIEKTI | NHKPSNTKVDKKVEPKSCDKTHTCPPCPAPEAAGG | LWVFGGGTKLTVLGQP |
| | SKAKGQPREPQVYTLPPSREEMTKNQVSLWC | PSVFLFPPKPKDTLMISRTPEVICVVVDVSHEDPE | KAAPSVTLFPPSSEEL |
| | LVKGFYPSDIAVEWESNGQPENNYKTTPPVL | VKFNWYVDGVEVHNAKTKPREEQYNSTYRVVSVLT | QANKATLVCLISDFYP |
| | DSDGSFFLYSKLTVDKSRWQQGNVFSCSVLH | VLHQDWLNGKEYKCKVSNKALPASIEKTISKAKGQ | GAVTVAWKADSSPVKA |
| | EALHSHYTQKSLSLSPGK | PREPQVYTLPPSREEMTKNQVSLSCAVKGFYPSDI | GVETTTPSKQSNNKYA |
| | | AVEWESNGQPENNYKTTPPVLDSDGSFFLVSKLTV | ASSYLSLTPEQWKSHR |
| | | DKSRWQQGNVFSCSVMHEALHNRYTQKSLSLSPGK | SYSCQVTHEGSTVEKT |
| | | | VAPTECS |
| 190 | SEQ ID NO: 764 | SEQ ID NO: 752 | SEQ ID NO: 753 |
| hCD4 | KKVVYGKKGDTVELTCTASQKKNIQFHWKNS | EVQLVESGGGLVQPGGSLRLSCAASGFTFNTYAMN | QAVVTQEPSLTVSPGG |
| D1.22 | NQIKILGNQGSFLTKGPSKLNDRVDSRRSLW | WVRQAPGKGLEWVGRIRSKYNNYATYYADSVKSRF | TVTLTCGSSTGAVTTG |
| (tandem) Fc | DQGNFPLIIKNLKPEDSDTYICEVEDQKEEV | TISRDDSKNSLYLEMNSLRTEDTAVYYCVRHGNFG | HYANWVQQKPGQAPRG |
| AAS + W + | QLVVVGGGGSGKKVVYGKKGDTVELTCTASQ | HSYVSWFAYWGQGTLVTVSSASTKGPSVFPLAPSS | LIGGTSNRAPGVPARF |
| YTE/ | KKNIQFHWKNSNQIKILGNQGSFLTKGPSKL | KSTSGGTAALGCLVKDYFPEPVTVSWNSGALTSGV | SGSLLGGKAALTISGA |
| huSP34.39.13 | NDRVDSRRSLWDQGNFPLIIKNLKPEDSDTY | HTFPAVLQSSGLYSLSSVVTVPSSSLGTQTYICNV | QPEDEAEYYCALWYSN |
| AAS + SAV + | ICEVEDQKEEVQLVVVGGSDKTHTCPPCPAP | NHKPSNTKVDKKVEPKSCDKTHTCPPCPAPEAAGG | RWVFGGGTKLTVLGQP |
| R | EAAGGPSVFLFPPKPKDTLYITREPEVTCVV | PSVFLFPPKPKDTLMISRTPEVICVVVDVSHEDPE | KAAPSVTLFPPSSEEL |
| | VDVSHEDPEVKFNWYVDGVEVHNAKTKPREE | VKFNWYVDGVEVHNAKTKPREEQYNSTYRVVSVLT | QANKATLVCLISDFYP |
| | QYNSTYRVVSVLTVLHQDWLNGKEYKCKVSN | VLHQDWLNGKEYKCKVSNKALPASIEKTISKAKGQ | GAVTVAWKADSSPVKA |
| | KALPASIEKTISKAKGQPREPQVYTLPPSRE | PREPQVYTLPPSREEMTKNQVSLSCAVKGFYPSDI | GVETTTPSKQSNNKYA |
| | EMTKNQVSLWCLVKGFYPSDIAVEWESNGQP | AVEWESNGQPENNYKTTPPVLDSDGSFFLVSKLTV | ASSYLSLTPEQWKSHR |
| | ENNYKTTPPVLDSDGSFFLYSKLTVDKSRWQ | DKSRWQQGNVFSCSVMHEALHNRYTQKSLSLSPGK | SYSCQVTHEGSTVEKT |
| | QGNVFSCSVMHEALHNHYTQKSLSLSPGK | | VAPTECS |
| 191 | SEQ ID NO: 765 | SEQ ID NO: 752 | SEQ ID NO: 753 |
| hCD4 | KKVVYGKKGDTVELTCTASQKKNIQFHWKNS | EVQLVESGGGLVQPGGSLRLSCAASGFTFNTYAMN | QAVVTQEPSLTVSPGG |
| D1.22 | NQIKILGNQGSFLTKGPSKLNDRVDSRRSLW | WVRQAPGKGLEWVGRIRSKYNNYATYYADSVKSRF | TVTLTCGSSTGAVTTG |
| (tandem) Fc | DQGNFPLIIKNLKPEDSDTYICEVEDQKEEV | TISRDDSKNSLYLEMNSLRTEDTAVYYCVRHGNFG | HYANWVQQKPGQAPRG |
| AAS + W/ | QLVVVGGGGSGKKVVYGKKGDTVELTCTASQ | HSYVSWFAYWGQGTLVTVSSASTKGPSVFPLAPSS | LIGGTSNRAPGVPARF |
| huSP34.39.13 | KKNIQFHWKNSNQIKILGNQGSFLTKGPSKL | KSTSGGTAALGCLVKDYFPEPVTVSWNSGALTSGV | SGSLLGGKAALTISGA |
| AAS + SAV + | NDRVDSRRSLWDQGNFPLIIKNLKPEDSDTY | HTFPAVLQSSGLYSLSSVVTVPSSSLGTQTYICNV | QPEDEAEYYCALWYSN |
| R | ICEVEDQKEEVQLVVVGGSDKTHTCPPCPAP | NHKPSNTKVDKKVEPKSCDKTHTCPPCPAPEAAGG | RWVFGGGTKLTVLGQP |
| | EAAGGPSVFLFPPKPKDTLMISRTPEVICVV | PSVFLFPPKPKDTLMISRTPEVICVVVDVSHEDPE | KAAPSVTLFPPSSEEL |
| | VDVSHEDPEVKFNWYVDGVEVHNAKTKPREE | VKFNWYVDGVEVHNAKTKPREEQYNSTYRVVSVLT | QANKATLVCLISDFYP |
| | QYNSTYRVVSVLTVLHQDWLNGKEYKCKVSN | VLHQDWLNGKEYKCKVSNKALPASIEKTISKAKGQ | GAVTVAWKADSSPVKA |
| | KALPASIEKTISKAKGQPREPQVYTLPPSRE | PREPQVYTLPPSREEMTKNQVSLSCAVKGFYPSDI | GVETTTPSKQSNNKYA |
| | EMTKNQVSLWCLVKGFYPSDIAVEWESNGQP | AVEWESNGQPENNYKTTPPVLDSDGSFFLVSKLTV | ASSYLSLTPEQWKSHR |
| | ENNYKTTPPVLDSDGSFFLYSKLTVDKSRWQ | DKSRWQQGNVFSCSVMHEALHNRYTQKSLSLSPGK | SYSCQVTHEGSTVEKT |
| | QGNVFSCSVMHEALHNHYTQKSLSLSPGK | | VAPTECS |
| 192 | SEQ ID NO: 766 | SEQ ID NO: 767 | SEQ ID NO: 753 |
| hCD4 | KKVVYGKKGDTVELTCTASQKKNIQFHWKNS | EVQLVESGGGLVQPGGSLRLSCAASGFTFNTYAMN | QAVVTQEPSLTVSPGG |
| D1.22 | NQIKILGNQGSFLTKGPSKLNDRVDSRRSLW | WVRQAPGKGLEWVGRIRSKYNNYATYYADSVKGRF | TVTLTCGSSTGAVTTG |
| (tandem) Fc | DQGNFPLIIKNLKPEDSDTYICEVEDQKEEV | TISRDDSKNSLYLQMNSLRTEDTAVYYCVRHGNFG | HYANWVQQKPGQAPRG |
| AAS + SAV + | QLVVVGGGGSGKKVVYGKKGDTVELTCTASQ | HSYVSWFAYWGQGTLVTVSSASTKGPSVFPLAPSS | LIGGTSNRAPGVPARF |
| R/ | KKNIQFHWKNSNQIKILGNQGSFLTKGPSKL | KSTSGGTAALGCLVKDYFPEPVTVSWNSGALTSGV | SGSLLGGKAALTISGA |
| huSP34.3.13 | NDRVDSRRSLWDQGNFPLIIKNLKPEDSDTY | HTFPAVLQSSGLYSLSSVVTVPSSSLGTQTYICNV | QPEDEAEYYCALWYSN |
| AAS + W + | ICEVEDQKEEVQLVVVGGSDKTHTCPPCPAP | NHKPSNTKVDKKVEPKSCDKTHTCPPCPAPEAAGG | RWVFGGGTKLTVLGQP |
| YTE | EAAGGPSVFLFPPKPKDTLMISRTPEVICVV | PSVFLFPPKPKDTLYITREPEVTCVVVDVSHEDPE | KAAPSVTLFPPSSEEL |
| | VDVSHEDPEVKFNWYVDGVEVHNAKTKPREE | VKFNWYVDGVEVHNAKTKPREEQYNSTYRVVSVLT | QANKATLVCLISDFYP |
| | QYNSTYRVVSVLTVLHQDWLNGKEYKCKVSN | VLHQDWLNGKEYKCKVSNKALPASIEKTISKAKGQ | GAVTVAWKADSSPVKA |
| | KALPASIEKTISKAKGQPREPQVYTLPPSRE | PREPQVYTLPPSREEMTKNQVSLWCLVKGFYPSDI | GVETTTPSKQSNNKYA |
| | EMTKNQVSLSCAVKGFYPSDIAVEWESNGQP | AVEWESNGQPENNYKTTPPVLDSDGSFFLYSKLTV | ASSYLSLTPEQWKSHR |
| | ENNYKTTPPVLDSDGSFFLVSKLTVDKSRWQ | DKSRWQQGNVFSCSVMHEALHNHYTQKSLSLSPGK | SYSCQVTHEGSTVEKT |
| | QGNVFSCSVMHEALHNRYTQKSLSLSPGK | | VAPTECS |
| 193 | SEQ ID NO: 766 | SEQ ID NO: 768 | SEQ ID NO: 753 |
| hCD4 | KKVVYGKKGDTVELTCTASQKKNIQFHWKNS | EVQLVESGGGLVQPGGSLRLSCAASGFTFNTYAMN | QAVVTQEPSLTVSPGG |
| D1.22 | NQIKILGNQGSFLTKGPSKLNDRVDSRRSLW | WVRQAPGKGLEWVGRIRSKYNNYATYYADSVKGRF | TVTLTCGSSTGAVTTG |
| (tandem) Fc | DQGNFPLIIKNLKPEDSDTYICEVEDQKEEV | TISRDDSKNSLYLQMNSLRTEDTAVYYCVRHGNFG | HYANWVQQKPGQAPRG |
| AAS + SAV + | QLVVVGGGGSGKKVVYGKKGDTVELTCTASQ | HSYVSWFAYWGQGTLVTVSSASTKGPSVFPLAPSS | LIGGTSNRAPGVPARF |
| R/ | KKNIQFHWKNSNQIKILGNQGSFLTKGPSKL | KSTSGGTAALGCLVKDYFPEPVTVSWNSGALTSGV | SGSLLGGKAALTISGA |
| huSP34.3.13 | NDRVDSRRSLWDQGNFPLIIKNLKPEDSDTY | HTFPAVLQSSGLYSLSSVVTVPSSSLGTQTYICNV | QPEDEAEYYCALWYSN |
| AAS + W | ICEVEDQKEEVQLVVVGGSDKTHTCPPCPAP | NHKPSNTKVDKKVEPKSCDKTHTCPPCPAPEAAGG | RWVFGGGTKLTVLGQP |
| | EAAGGPSVFLFPPKPKDTLMISRTPEVICVV | PSVFLFPPKPKDTLMISRTPEVICVVVDVSHEDPE | KAAPSVTLFPPSSEEL |
| | VDVSHEDPEVKFNWYVDGVEVHNAKTKPREE | VKFNWYVDGVEVHNAKTKPREEQYNSTYRVVSVLT | QANKATLVCLISDFYP |
| | QYNSTYRVVSVLTVLHQDWLNGKEYKCKVSN | VLHQDWLNGKEYKCKVSNKALPASIEKTISKAKGQ | GAVTVAWKADSSPVKA |
| | KALPASIEKTISKAKGQPREPQVYTLPPSRE | PREPQVYTLPPSREEMTKNQVSLWCLVKGFYPSDI | GVETTTPSKQSNNKYA |
| | EMTKNQVSLSCAVKGFYPSDIAVEWESNGQP | AVEWESNGQPENNYKTTPPVLDSDGSFFLYSKLTV | ASSYLSLTPEQWKSHR |
| | ENNYKTTPPVLDSDGSFFLVSKLTVDKSRWQ | DKSRWQQGNVFSCSVMHEALHNHYTQKSLSLSPGK | SYSCQVTHEGSTVEKT |
| | QGNVFSCSVMHEALHNRYTQKSLSLSPGK | | VAPTECS |
| 194 | SEQ ID NO: 769 | SEQ ID NO: 768 | SEQ ID NO: 753 |
| hCD4 | KKVVYGKKGDTVELTCTASQKKNIQFHWKNS | EVQLVESGGGLVQPGGSLRLSCAASGFTFNTYAMN | QAVVTQEPSLTVSPGG |
| D1.22 | NQIKILGNQGSFLTKGPSKLNDRVDSRRSLW | WVRQAPGKGLEWVGRIRSKYNNYATYYADSVKGRF | TVTLTCGSSTGAVTTG |
| (tandem) Fc | DQGNFPLIIKNLKPEDSDTYICEVEDQKEEV | TISRDDSKNSLYLQMNSLRTEDTAVYYCVRHGNFG | HYANWVQQKPGQAPRG |
| AAS + SAV/ | QLVVVGGGGSGKKVVYGKKGDTVELTCTASQ | HSYVSWFAYWGQGTLVTVSSASTKGPSVFPLAPSS | LIGGTSNRAPGVPARF |
| huSP34.3.13 | KKNIQFHWKNSNQIKILGNQGSFLTKGPSKL | KSTSGGTAALGCLVKDYFPEPVTVSWNSGALTSGV | SGSLLGGKAALTISGA |
| AAS + W | NDRVDSRRSLWDQGNFPLIIKNLKPEDSDTY | HTFPAVLQSSGLYSLSSVVTVPSSSLGTQTYICNV | QPEDEAEYYCALWYSN |
| | ICEVEDQKEEVQLVVVGGSDKTHTCPPCPAP | NHKPSNTKVDKKVEPKSCDKTHTCPPCPAPEAAGG | RWVFGGGTKLTVLGQP |
| | EAAGGPSVFLFPPKPKDTLMISRTPEVICVV | PSVFLFPPKPKDTLMISRTPEVICVVVDVSHEDPE | KAAPSVTLFPPSSEEL |
| | VDVSHEDPEVKFNWYVDGVEVHNAKTKPREE | VKFNWYVDGVEVHNAKTKPREEQYNSTYRVVSVLT | QANKATLVCLISDFYP |
| | QYNSTYRVVSVLTVLHQDWLNGKEYKCKVSN | VLHQDWLNGKEYKCKVSNKALPASIEKTISKAKGQ | GAVTVAWKADSSPVKA |
| | KALPASIEKTISKAKGQPREPQVYTLPPSRE | PREPQVYTLPPSREEMTKNQVSLWCLVKGFYPSDI | GVETTTPSKQSNNKYA |
| | EMTKNQVSLSCAVKGFYPSDIAVEWESNGQP | AVEWESNGQPENNYKTTPPVLDSDGSFFLYSKLTV | ASSYLSLTPEQWKSHR |
| | ENNYKTTPPVLDSDGSFFLVSKLTVDKSRWQ | DKSRWQQGNVFSCSVMHEALHNHYTQKSLSLSPGK | SYSCQVTHEGSTVEKT |
| | QGNVFSCSVMHEALHNHYTQKSLSLSPGK | | VAPTECS |
| 195 | SEQ ID NO: 770 | SEQ ID NO: 767 | SEQ ID NO: 753 |
| hCD4 | KKVVYGKKGDTVELTCTASQKKNIQFHWKNS | EVQLVESGGGLVQPGGSLRLSCAASGFTFNTYAMN | QAVVTQEPSLTVSPGG |
| D1.22 | NQIKILGNQGSFLTKGPSKLNDRVDSRRSLW | WVRQAPGKGLEWVGRIRSKYNNYATYYADSVKGRF | TVTLTCGSSTGAVTTG |
| (tandem) Fc | DQGNFPLIIKNLKPEDSDTYICEVEDQKEEV | TISRDDSKNSLYLQMNSLRTEDTAVYYCVRHGNFG | HYANWVQQKPGQAPRG |
| AAS + SAV + | QLVVVGGGGSGKKVVYGKKGDTVELTCTASQ | HSYVSWFAYWGQGTLVTVSSASTKGPSVFPLAPSS | LIGGTSNRAPGVPARF |
| YTE/ | KKNIQFHWKNSNQIKILGNQGSFLTKGPSKL | KSTSGGTAALGCLVKDYFPEPVTVSWNSGALTSGV | SGSLLGGKAALTISGA |
| huSP34.3.13 | NDRVDSRRSLWDQGNFPLIIKNLKPEDSDTY | HTFPAVLQSSGLYSLSSVVTVPSSSLGTQTYICNV | QPEDEAEYYCALWYSN |
| AAS + W + | ICEVEDQKEEVQLVVVGGSDKTHTCPPCPAP | NHKPSNTKVDKKVEPKSCDKTHTCPPCPAPEAAGG | RWVFGGGTKLTVLGQP |
| YTE | EAAGGPSVFLFPPKPKDTLYITREPEVTCVV | PSVFLFPPKPKDTLYITREPEVTCVVVDVSHEDPE | KAAPSVTLFPPSSEEL |
| | VDVSHEDPEVKFNWYVDGVEVHNAKTKPREE | VKFNWYVDGVEVHNAKTKPREEQYNSTYRVVSVLT | QANKATLVCLISDFYP |
| | QYNSTYRVVSVLTVLHQDWLNGKEYKCKVSN | VLHQDWLNGKEYKCKVSNKALPASIEKTISKAKGQ | GAVTVAWKADSSPVKA |
| | KALPASIEKTISKAKGQPREPQVYTLPPSRE | PREPQVYTLPPSREEMTKNQVSLWCLVKGFYPSDI | GVETTTPSKQSNNKYA |
| | EMTKNQVSLSCAVKGFYPSDIAVEWESNGQP | AVEWESNGQPENNYKTTPPVLDSDGSFFLYSKLTV | ASSYLSLTPEQWKSHR |
| | ENNYKTTPPVLDSDGSFFLVSKLTVDKSRWQ | DKSRWQQGNVFSCSVMHEALHNHYTQKSLSLSPGK | SYSCQVTHEGSTVEKT |
| | QGNVFSCSVMHEALHNHYTQKSLSLSPGK | | VAPTECS |
| 196 | SEQ ID NO: 765 | SEQ ID NO: 771 | SEQ ID NO: 761 |
| hCD4 | KKVVYGKKGDTVELTCTASQKKNIQFHWKNS | EVQLVESGGGLVQPGGSLRLSCAASGFTFNTYAMN | QAVVTQEPSLTVSPGG |
| D1.22 | NQIKILGNQGSFLTKGPSKLNDRVDSRRSLW | WVRQAPGKGLEWVGRIRSKYNNYATYYAASVKGRF | TVTLTCGSSTGAVTTG |
| (tandem) Fc | DQGNFPLIIKNLKPEDSDTYICEVEDQKEEV | TISRDDSKNSLYLQMNSLKTEDTAMYYCVRHGNFG | HYANWVQQKPGQAPRG |
| AAS + W/ | QLVVVGGGGSGKKVVYGKKGDTVELTCTASQ | NSYVSWFAYWGQGTLVTVSSASTKGPSVFPLAPSS | LIGGTNKRAPWTPARF |
| huSP34.1.3 | KKNIQFHWKNSNQIKILGNQGSFLTKGPSKL | KSTSGGTAALGCLVKDYFPEPVTVSWNSGALTSGV | SGSLLGGKAALTLSGA |
| AAS + SAV + | NDRVDSRRSLWDQGNFPLIIKNLKPEDSDTY | HTFPAVLQSSGLYSLSSVVTVPSSSLGTQTYICNV | QPEDEAEYYCALWYSN |
| R | ICEVEDQKEEVQLVVVGGSDKTHTCPPCPAP | NHKPSNTKVDKKVEPKSCDKTHTCPPCPAPEAAGG | LWVFGGGTKLTVLGQP |
| | EAAGGPSVFLFPPKPKDTLMISRTPEVICVV | PSVFLFPPKPKDTLMISRTPEVICVVVDVSHEDPE | KAAPSVTLFPPSSEEL |
| | VDVSHEDPEVKFNWYVDGVEVHNAKTKPREE | VKFNWYVDGVEVHNAKTKPREEQYNSTYRVVSVLT | QANKATLVCLISDFYP |
| | QYNSTYRVVSVLTVLHQDWLNGKEYKCKVSN | VLHQDWLNGKEYKCKVSNKALPASIEKTISKAKGQ | GAVTVAWKADSSPVKA |
| | KALPASIEKTISKAKGQPREPQVYTLPPSRE | PREPQVYTLPPSREEMTKNQVSLSCAVKGFYPSDI | GVETTTPSKQSNNKYA |
| | EMTKNQVSLWCLVKGFYPSDIAVEWESNGQP | AVEWESNGQPENNYKTTPPVLDSDGSFFLVSKLTV | ASSYLSLTPEQWKSHR |
| | ENNYKTTPPVLDSDGSFFLYSKLTVDKSRWQ | DKSRWQQGNVFSCSVMHEALHNRYTQKSLSLSPGK | SYSCQVTHEGSTVEKT |
| | QGNVFSCSVMHEALHNHYTQKSLSLSPGK | | VAPTECS |
| 197 | SEQ ID NO: 772 | SEQ ID NO: 771 | SEQ ID NO: 761 |
| hCD4 | KKVVYGKKGDTVELTCTASQKKNIQFHWKNS | EVQLVESGGGLVQPGGSLRLSCAASGFTFNTYAMN | QAVVTQEPSLTVSPGG |
| D1.22 | NQIKILGNQGSFLTKGPSKLNDRVDSRRSLW | WVRQAPGKGLEWVGRIRSKYNNYATYYAASVKGRF | TVTLTCGSSTGAVTTG |
| (tandem) Fc | DQGNFPLIIKNLKPEDSDTYICEVEDQKEEV | TISRDDSKNSLYLQMNSLKTEDTAMYYCVRHGNFG | HYANWVQQKPGQAPRG |
| AAS + W + | QLVVVGGGGSGKKVVYGKKGDTVELTCTASQ | NSYVSWFAYWGQGTLVTVSSASTKGPSVFPLAPSS | LIGGTNKRAPWTPARF |
| LS/ | KKNIQFHWKNSNQIKILGNQGSFLTKGPSKL | KSTSGGTAALGCLVKDYFPEPVTVSWNSGALTSGV | SGSLLGGKAALTLSGA |
| huSP34.1.3 | NDRVDSRRSLWDQGNFPLIIKNLKPEDSDTY | HTFPAVLQSSGLYSLSSVVTVPSSSLGTQTYICNV | QPEDEAEYYCALWYSN |
| AAS + SAV + | ICEVEDQKEEVQLVVVGGSDKTHTCPPCPAP | NHKPSNTKVDKKVEPKSCDKTHTCPPCPAPEAAGG | LWVFGGGTKLTVLGQP |
| R | EAAGGPSVFLFPPKPKDTLMISRTPEVICVV | PSVFLFPPKPKDTLMISRTPEVICVVVDVSHEDPE | KAAPSVTLFPPSSEEL |
| | VDVSHEDPEVKFNWYVDGVEVHNAKTKPREE | VKFNWYVDGVEVHNAKTKPREEQYNSTYRVVSVLT | QANKATLVCLISDFYP |
| | QYNSTYRVVSVLTVLHQDWLNGKEYKCKVSN | VLHQDWLNGKEYKCKVSNKALPASIEKTISKAKGQ | GAVTVAWKADSSPVKA |
| | KALPASIEKTISKAKGQPREPQVYTLPPSRE | PREPQVYTLPPSREEMTKNQVSLSCAVKGFYPSDI | GVETTTPSKQSNNKYA |
| | EMTKNQVSLWCLVKGFYPSDIAVEWESNGQP | AVEWESNGQPENNYKTTPPVLDSDGSFFLVSKLTV | ASSYLSLTPEQWKSHR |
| | ENNYKTTPPVLDSDGSFFLYSKLTVDKSRWQ | DKSRWQQGNVFSCSVMHEALHNRYTQKSLSLSPGK | SYSCQVTHEGSTVEKT |
| | QGNVFSCSVLHEALHSHYTQKSLSLSPGK | | VAPTECS |
| 198 | SEQ ID NO: 772 | SEQ ID NO: 773 | |
| hCD4- | KKVVYGKKGDTVELTCTASQKKNIQFHWKNS | EVQLVESGGGLVQPGGSLRLSCAASGFTFNTYAMN | |
| D1.22 | NQIKILGNQGSFLTKGPSKLNDRVDSRRSLW | WVRQAPGKGLEWVGRIRSKYNNYATYYAASVKGRF | |
| (tandem) Fc | DQGNFPLIIKNLKPEDSDTYICEVEDQKEEV | TISRDDSKNSLYLQMNSLKTEDTAMYYCVRHGNFG | |
| AAS + W + | QLVVVGGGGSGKKVVYGKKGDTVELTCTASQ | NSYVSWFAYWGQGTLVTVSSGGGGSGGGGSGGGGS | |
| LS/ | KKNIQFHWKNSNQIKILGNQGSFLTKGPSKL | GGGGSQAVVTQEPSLTVSPGGTVTLTCGSSTGAVT | |
| huSP34.1.3scFv | NDRVDSRRSLWDQGNFPLIIKNLKPEDSDTY | TGHYANWVQQKPGQAPRGLIGGTNKRAPWTPARFS | |
| AAS + SAV | ICEVEDQKEEVQLVVVGGSDKTHTCPPCPAP | GSLLGGKAALTLSGAQPEDEAEYYCALWYSNLWVF | |
| R | EAAGGPSVFLFPPKPKDTLMISRTPEVICVV | GGGTKLTVLEPKSSDKTHTCPPCPAPEAAGGPSVF | |
| | VDVSHEDPEVKFNWYVDGVEVHNAKTKPREE | LFPPKPKDTLMISRTPEVTCVVVDVSHEDPEVKFN | |
| | QYNSTYRVVSVLTVLHQDWLNGKEYKCKVSN | WYVDGVEVHNAKTKPREEQYNSTYRVVSVLTVLHQ | |
| | KALPASIEKTISKAKGQPREPQVYTLPPSRE | DWLNGKEYKCKVSNKALPASIEKTISKAKGQPREP | |
| | EMTKNQVSLWCLVKGFYPSDIAVEWESNGQP | QVYTLPPSREEMTKNQVSLSCAVKGFYPSDIAVEW | |
| | ENNYKTTPPVLDSDGSFFLYSKLTVDKSRWQ | ESNGQPENNYKTTPPVLDSDGSFFLVSKLTVDKSR | |
| | QGNVFSCSVLHEALHSHYTQKSLSLSPGK | WQQGNVFSCSVMHEALHNRYTQKSLSLSPGK | |
| 199 | SEQ ID NO: 774 | SEQ ID NO: 775 | SEQ ID NO: 776 |
| hCD4- | EVQLVESGGGLVQPGGSLRLSCAASGFTFNT | KKVVYGKKGDTVELTCTASQKKNIQFHWKNSNQIK | KKVVYGKKGDTVELTC |
| D1.22 | YAMNWVRQAPGKGLEWVGRIRSKYNNYATYY | ILGNQGSFLTKGPSKLNDRVDSRRSLWDQGNFPLI | TASQKKNIQFHWKNSN |
| (bivalent) | AASVKGRFTISRDDSKNSLYLQMNSLKTEDT | IKNLKPEDSDTYICEVEDQKEEVQLVVVGGGGSGS | QIKILGNQGSFLTKGP |
| AAS + W + LS/ | AMYYCVRHGNFGNSYVSWFAYWGQGTLVTVS | SASTKGPSVFPLAPSSKSTSGGTAALGCLVKDYFP | SKLNDRVDSRRSLWDQ |
| huSP34.1.3scFv | SGGGGSGGGGSGGGGSGGGGSQAVVTQEPSL | EPVTVSWNSGALTSGVHTFPAVLQSSGLYSLSSVV | GNFPLIIKNLKPEDSD |
| AAS + SAV + | TVSPGGTVTLTCGSSTGAVTTGHYANWVQQK | TVPSSSLGTQTYICNVNHKPSNTKVDKKVEPKSCD | TYICEVEDQKEEVQLV |
| R | PGQAPRGLIGGTNKRAPWTPARFSGSLLGGK | KTHTCPPCPAPEAAGGPSVFLFPPKPKDTLMISRT | VVGGGGSGKRTVAAPS |
| | AALTLSGAQPEDEAEYYCALWYSNLWVFGGG | PEVTCVVVDVSHEDPEVKFNWYVDGVEVHNAKTKP | VFIFPPSDEQLKSGTA |
| | TKLTVLEPKSSDKTHTCPPCPAPEAAGGPSV | REEQYNSTYRVVSVLTVLHQDWLNGKEYKCKVSNK | SVVCLLNNFYPREAKV |
| | FLFPPKPKDTLMISRTPEVICVVVDVSHEDP | ALPASIEKTISKAKGQPREPQVYTLPPSREEMTKN | QWKVDNALQSGNSQES |
| | EVKFNWYVDGVEVHNAKTKPREEQYNSTYRV | QVSLWCLVKGFYPSDIAVEWESNGQPENNYKTTPP | VTEQDSKDSTYSLSST |
| | VSVLTVLHQDWLNGKEYKCKVSNKALPASIE | VLDSDGSFFLYSKLTVDKSRWQQGNVFSCSVLHEA | LTLSKADYEKHKVYAC |
| | KTISKAKGQPREPQVYTLPPSREEMTKNQVS | LHSHYTQKSLSLSPGK | EVTHQGLSSPVTKSFN |
| | LSCAVKGFYPSDIAVEWESNGQPENNYKTTP | | RGEC |
| | PVLDSDGSFFLVSKLTVDKSRWQQGNVFSCS | | |
| | VMHEALHNRYTQKSLSLSPGK | | |
| 200 | SEQ ID NO: 777 | SEQ ID NO: 778 | SEQ ID NO: 776 |
| hCD4 | EVQLVESGGGLVQPGGSLRLSCAASGFTFNT | KKVVYGKKGDTVELTCTASQKKNIQFHWKNSNQIK | KKVVYGKKGDTVELTC |
| D1.22 | YAMNWVRQAPGKGLEWVGRIRSKYNNYATYY | ILGNQGSFLTKGPSKLNDRVDSRRSLWDQGNFPLI | TASQKKNIQFHWKNSN |
| (bivalent) | ADSVKGRFTISRDDSKNSLYLQMNSLRTEDT | IKNLKPEDSDTYICEVEDQKEEVQLVVVGGGGSGS | QIKILGNQGSFLTKGP |
| AAS + SAV + R/ | AVYYCVRHGNFGHSYVSWFAYWGQGTLVTVS | SASTKGPSVFPLAPSSKSTSGGTAALGCLVKDYFP | SKLNDRVDSRRSLWDQ |
| huSP34.3.13scFv | SGGGGSGGGGSGGGGSGGGGSQAVVTQEPSL | EPVTVSWNSGALTSGVHTFPAVLQSSGLYSLSSVV | GNFPLIIKNLKPEDSD |
| AAS + W + YTE | TVSPGGTVTLTCGSSTGAVTTGHYANWVQQK | TVPSSSLGTQTYICNVNHKPSNTKVDKKVEPKSCD | TYICEVEDQKEEVQLV |
| | PGQAPRGLIGGTSNRAPGVPARFSGSLLGGK | KTHTCPPCPAPEAAGGPSVFLFPPKPKDTLMISRT | VVGGGGSGKRTVAAPS |
| | AALTISGAQPEDEAEYYCALWYSNRWVFGGG | PEVTCVVVDVSHEDPEVKFNWYVDGVEVHNAKTKP | VFIFPPSDEQLKSGTA |
| | TKLTVLEPKSSDKTHTCPPCPAPEAAGGPSV | REEQYNSTYRVVSVLTVLHQDWLNGKEYKCKVSNK | SVVCLLNNFYPREAKV |
| | FLFPPKPKDTLYITREPEVTCVVVDVSHEDP | ALPASIEKTISKAKGQPREPQVYTLPPSREEMTKN | QWKVDNALQSGNSQES |
| | EVKFNWYVDGVEVHNAKTKPREEQYNSTYRV | QVSLSCAVKGFYPSDIAVEWESNGQPENNYKTTPP | VTEQDSKDSTYSLSST |
| | VSVLTVLHQDWLNGKEYKCKVSNKALPASIE | VLDSDGSFFLVSKLTVDKSRWQQGNVFSCSVMHEA | LTLSKADYEKHKVYAC |
| | KTISKAKGQPREPQVYTLPPSREEMTKNQVS | LHNRYTQKSLSLSPGK | EVTHQGLSSPVTKSFN |
| | LWCLVKGFYPSDIAVEWESNGQPENNYKTTP | | RGEC |
| | PVLDSDGSFFLYSKLTVDKSRWQQGNVFSCS | | |
| | VMHEALHNHYTQKSLSLSPGK | | |
| 201 | SEQ ID NO: 779 | SEQ ID NO: 778 | SEQ ID NO: 776 |
| hCD4 | EVQLVESGGGLVQPGGSLRLSCAASGFTFNT | KKVVYGKKGDTVELTCTASQKKNIQFHWKNSNQIK | KKVVYGKKGDTVELTC |
| D1.22 | YAMNWVRQAPGKGLEWVGRIRSKYNNYATYY | ILGNQGSFLTKGPSKLNDRVDSRRSLWDQGNFPLI | TASQKKNIQFHWKNSN |
| (bivalent) | ADSVKGRFTISRDDSKNSLYLQMNSLRTEDT | IKNLKPEDSDTYICEVEDQKEEVQLVVVGGGGSGS | QIKILGNQGSFLTKGP |
| AAS + SAV + | AVYYCVRHGNFGHSYVSWFAYWGQGTLVTVS | SASTKGPSVFPLAPSSKSTSGGTAALGCLVKDYFP | SKLNDRVDSRRSLWDQ |
| R/ | SGGGGSGGGGSGGGGSGGGGSQAVVTQEPSL | EPVTVSWNSGALTSGVHTFPAVLQSSGLYSLSSVV | GNFPLIIKNLKPEDSD |
| huSP34.3.13scFv | TVSPGGTVTLTCGSSTGAVTTGHYANWVQQK | TVPSSSLGTQTYICNVNHKPSNTKVDKKVEPKSCD | TYICEVEDQKEEVQLV |
| AAS + W | PGQAPRGLIGGTSNRAPGVPARFSGSLLGGK | KTHTCPPCPAPEAAGGPSVFLFPPKPKDTLMISRT | VVGGGGSGKRTVAAPS |
| | AALTISGAQPEDEAEYYCALWYSNRWVFGGG | PEVTCVVVDVSHEDPEVKFNWYVDGVEVHNAKTKP | VFIFPPSDEQLKSGTA |
| | TKLTVLEPKSSDKTHTCPPCPAPEAAGGPSV | REEQYNSTYRVVSVLTVLHQDWLNGKEYKCKVSNK | SVVCLLNNFYPREAKV |
| | FLFPPKPKDTLMISRTPEVICVVVDVSHEDP | ALPASIEKTISKAKGQPREPQVYTLPPSREEMTKN | QWKVDNALQSGNSQES |
| | EVKFNWYVDGVEVHNAKTKPREEQYNSTYRV | QVSLSCAVKGFYPSDIAVEWESNGQPENNYKTTPP | VTEQDSKDSTYSLSST |
| | VSVLTVLHQDWLNGKEYKCKVSNKALPASIE | VLDSDGSFFLVSKLTVDKSRWQQGNVFSCSVMHEA | LTLSKADYEKHKVYAC |
| | KTISKAKGQPREPQVYTLPPSREEMTKNQVS | LHNRYTQKSLSLSPGK | EVTHQGLSSPVTKSFN |
| | LWCLVKGFYPSDIAVEWESNGQPENNYKTTP | | RGEC |
| | PVLDSDGSFFLYSKLTVDKSRWQQGNVFSCS | | |
| | VMHEALHNHYTQKSLSLSPGK | | |
| 202 | SEQ ID NO: 779 | SEQ ID NO: 780 | SEQ ID NO: 776 |
| hCD4 | EVQLVESGGGLVQPGGSLRLSCAASGFTFNT | KKVVYGKKGDTVELTCTASQKKNIQFHWKNSNQIK | KKVVYGKKGDTVELTC |
| D1.22 | YAMNWVRQAPGKGLEWVGRIRSKYNNYATYY | ILGNQGSFLTKGPSKLNDRVDSRRSLWDQGNFPLI | TASQKKNIQFHWKNSN |
| (bivalent) | ADSVKGRFTISRDDSKNSLYLQMNSLRTEDT | IKNLKPEDSDTYICEVEDQKEEVQLVVVGGGGSGS | QIKILGNQGSFLTKGP |
| AAS + SAV/ | AVYYCVRHGNFGHSYVSWFAYWGQGTLVTVS | SASTKGPSVFPLAPSSKSTSGGTAALGCLVKDYFP | SKLNDRVDSRRSLWDQ |
| huSP34.3.13scFv | SGGGGSGGGGSGGGGSGGGGSQAVVTQEPSL | EPVTVSWNSGALTSGVHTFPAVLQSSGLYSLSSVV | GNFPLIIKNLKPEDSD |
| AAS + W | TVSPGGTVTLTCGSSTGAVTTGHYANWVQQK | TVPSSSLGTQTYICNVNHKPSNTKVDKKVEPKSCD | TYICEVEDQKEEVQLV |
| | PGQAPRGLIGGTSNRAPGVPARFSGSLLGGK | KTHTCPPCPAPEAAGGPSVFLFPPKPKDTLMISRT | VVGGGGSGKRTVAAPS |
| | AALTISGAQPEDEAEYYCALWYSNRWVFGGG | PEVTCVVVDVSHEDPEVKFNWYVDGVEVHNAKTKP | VFIFPPSDEQLKSGTA |
| | TKLTVLEPKSSDKTHTCPPCPAPEAAGGPSV | REEQYNSTYRVVSVLTVLHQDWLNGKEYKCKVSNK | SVVCLLNNFYPREAKV |
| | FLFPPKPKDTLMISRTPEVICVVVDVSHEDP | ALPASIEKTISKAKGQPREPQVYTLPPSREEMTKN | QWKVDNALQSGNSQES |
| | EVKFNWYVDGVEVHNAKTKPREEQYNSTYRV | QVSLSCAVKGFYPSDIAVEWESNGQPENNYKTTPP | VTEQDSKDSTYSLSST |
| | VSVLTVLHQDWLNGKEYKCKVSNKALPASIE | VLDSDGSFFLVSKLTVDKSRWQQGNVFSCSVMHEA | LTLSKADYEKHKVYAC |
| | KTISKAKGQPREPQVYTLPPSREEMTKNQVS | LHNHYTQKSLSLSPGK | EVTHQGLSSPVTKSFN |
| | LWCLVKGFYPSDIAVEWESNGQPENNYKTTP | | RGEC |
| | PVLDSDGSFFLYSKLTVDKSRWQQGNVFSCS | | |
| | VMHEALHNHYTQKSLSLSPGK | | |
| 203 | SEQ ID NO: 777 | SEQ ID NO: 781 | SEQ ID NO: 776 |
| hCD4 | EVQLVESGGGLVQPGGSLRLSCAASGFTFNT | KKVVYGKKGDTVELTCTASQKKNIQFHWKNSNQIK | KKVVYGKKGDTVELTC |
| D1.22 | YAMNWVRQAPGKGLEWVGRIRSKYNNYATYY | ILGNQGSFLTKGPSKLNDRVDSRRSLWDQGNFPLI | TASQKKNIQFHWKNSN |
| (bivalent) | ADSVKGRFTISRDDSKNSLYLQMNSLRTEDT | IKNLKPEDSDTYICEVEDQKEEVQLVVVGGGGSGS | QIKILGNQGSFLTKGP |
| AAS + SAV + | AVYYCVRHGNFGHSYVSWFAYWGQGTLVTVS | SASTKGPSVFPLAPSSKSTSGGTAALGCLVKDYFP | SKLNDRVDSRRSLWDQ |
| YTE/ | SGGGGSGGGGSGGGGSGGGGSQAVVTQEPSL | EPVTVSWNSGALTSGVHTFPAVLQSSGLYSLSSVV | GNFPLIIKNLKPEDSD |
| huSP34.3.13scFv | TVSPGGTVTLTCGSSTGAVTTGHYANWVQQK | TVPSSSLGTQTYICNVNHKPSNTKVDKKVEPKSCD | TYICEVEDQKEEVQLV |
| AAS + W + YTE | PGQAPRGLIGGTSNRAPGVPARFSGSLLGGK | KTHTCPPCPAPEAAGGPSVFLFPPKPKDTLYITRE | VVGGGGSGKRTVAAPS |
| | AALTISGAQPEDEAEYYCALWYSNRWVFGGG | PEVTCVVVDVSHEDPEVKFNWYVDGVEVHNAKTKP | VFIFPPSDEQLKSGTA |
| | TKLTVLEPKSSDKTHTCPPCPAPEAAGGPSV | REEQYNSTYRVVSVLTVLHQDWLNGKEYKCKVSNK | SVVCLLNNFYPREAKV |
| | FLFPPKPKDTLYITREPEVTCVVVDVSHEDP | ALPASIEKTISKAKGQPREPQVYTLPPSREEMTKN | QWKVDNALQSGNSQES |
| | EVKFNWYVDGVEVHNAKTKPREEQYNSTYRV | QVSLSCAVKGFYPSDIAVEWESNGQPENNYKTTPP | VTEQDSKDSTYSLSST |
| | VSVLTVLHQDWLNGKEYKCKVSNKALPASIE | VLDSDGSFFLVSKLTVDKSRWQQGNVFSCSVMHEA | LTLSKADYEKHKVYAC |
| | KTISKAKGQPREPQVYTLPPSREEMTKNQVS | LHNHYTQKSLSLSPGK | EVTHQGLSSPVTKSFN |
| | LWCLVKGFYPSDIAVEWESNGQPENNYKTTP | | RGEC |
| | PVLDSDGSFFLYSKLTVDKSRWQQGNVFSCS | | |
| | VMHEALHNHYTQKSLSLSPGK | | |
| 204 | SEQ ID NO: 782 | SEQ ID NO: 752 | SEQ ID NO: 753 |
| hCD4 | KKVVLGKKGDTVELTCTASQKKSIQFHWKNS | EVQLVESGGGLVQPGGSLRLSCAASGFTFNTYAMN | QAVVTQEPSLTVSPGG |
| D1D2 Fc | NQIKILGNQGSFLTKGPSKLNDRADSRRSLW | WVRQAPGKGLEWVGRIRSKYNNYATYYADSVKSRF | TVTLTCGSSTGAVTTG |
| AAS + W + YTE/ | DQGNFPLIIKNLKIEDSDTYICEVEDQKEEV | TISRDDSKNSLYLEMNSLRTEDTAVYYCVRHGNFG | HYANWVQQKPGQAPRG |
| huSP34.39.13 | QLLVFGLTANSDTHLLQGQSLTLTLESPPGS | HSYVSWFAYWGQGTLVTVSSASTKGPSVFPLAPSS | LIGGTSNRAPGVPARF |
| AAS + SAV + | SPSVQCRSPRGKNIQGGKTLSVSQLELQDSG | KSTSGGTAALGCLVKDYFPEPVTVSWNSGALTSGV | SGSLLGGKAALTISGA |
| R | TWTCTVLQNQKKVEFKIDIVVLAGSDKTHTC | HTFPAVLQSSGLYSLSSVVTVPSSSLGTQTYICNV | QPEDEAEYYCALWYSN |
| | PPCPAPEAAGGPSVFLFPPKPKDTLYITREP | NHKPSNTKVDKKVEPKSCDKTHTCPPCPAPEAAGG | RWVFGGGTKLTVLGQP |
| | EVTCVVVDVSHEDPEVKFNWYVDGVEVHNAK | PSVFLFPPKPKDTLMISRTPEVTOVVVDVSHEDPE | KAAPSVTLFPPSSEEL |
| | TKPREEQYNSTYRVVSVLTVLHQDWLNGKEY | VKFNWYVDGVEVHNAKTKPREEQYNSTYRVVSVLT | QANKATLVCLISDFYP |
| | KCKVSNKALPASIEKTISKAKGQPREPQVYT | VLHQDWLNGKEYKCKVSNKALPASIEKTISKAKGQ | GAVTVAWKADSSPVKA |
| | LPPSREEMTKNQVSLWCLVKGFYPSDIAVEW | PREPQVYTLPPSREEMTKNQVSLSCAVKGFYPSDI | GVETTTPSKQSNNKYA |
| | ESNGQPENNYKTTPPVLDSDGSFFLYSKLTV | AVEWESNGQPENNYKTTPPVLDSDGSFFLVSKLTV | ASSYLSLTPEQWKSHR |
| | DKSRWQQGNVFSCSVMHEALHNHYTQKSLSL | DKSRWQQGNVFSCSVMHEALHNRYTQKSLSLSPGK | SYSCQVTHEGSTVEKT |
| | SPGK | | VAPTECS |
| 205 | SEQ ID NO: 783 | SEQ ID NO: 752 | SEQ ID NO: 753 |
| hCD4 | KKVVLGKKGDTVELTCTASQKKSIQFHWKNS | EVQLVESGGGLVQPGGSLRLSCAASGFTFNTYAMN | QAVVTQEPSLTVSPGG |
| D1D2 Fc | NQIKILGNQGSFLTKGPSKLNDRADSRRSLW | WVRQAPGKGLEWVGRIRSKYNNYATYYADSVKSRF | TVTLTCGSSTGAVTTG |
| AAS + W/ | DQGNFPLIIKNLKIEDSDTYICEVEDQKEEV | TISRDDSKNSLYLEMNSLRTEDTAVYYCVRHGNFG | HYANWVQQKPGQAPRG |
| huSP34.39.13 | QLLVFGLTANSDTHLLQGQSLTLTLESPPGS | HSYVSWFAYWGQGTLVTVSSASTKGPSVFPLAPSS | LIGGTSNRAPGVPARF |
| AAS + SAV + | SPSVQCRSPRGKNIQGGKTLSVSQLELQDSG | KSTSGGTAALGCLVKDYFPEPVTVSWNSGALTSGV | SGSLLGGKAALTISGA |
| R | TWTCTVLQNQKKVEFKIDIVVLAGSDKTHTC | HTFPAVLQSSGLYSLSSVVTVPSSSLGTQTYICNV | QPEDEAEYYCALWYSN |
| | PPCPAPEAAGGPSVFLFPPKPKDTLMISRTP | NHKPSNTKVDKKVEPKSCDKTHTCPPCPAPEAAGG | RWVFGGGTKLTVLGQP |
| | EVTCVVVDVSHEDPEVKFNWYVDGVEVHNAK | PSVFLFPPKPKDTLMISRTPEVICVVVDVSHEDPE | KAAPSVTLFPPSSEEL |
| | TKPREEQYNSTYRVVSVLTVLHQDWLNGKEY | VKFNWYVDGVEVHNAKTKPREEQYNSTYRVVSVLT | QANKATLVCLISDFYP |
| | KCKVSNKALPASIEKTISKAKGQPREPQVYT | VLHQDWLNGKEYKCKVSNKALPASIEKTISKAKGQ | GAVTVAWKADSSPVKA |
| | LPPSREEMTKNQVSLWCLVKGFYPSDIAVEW | PREPQVYTLPPSREEMTKNQVSLSCAVKGFYPSDI | GVETTTPSKQSNNKYA |
| | ESNGQPENNYKTTPPVLDSDGSFFLYSKLTV | AVEWESNGQPENNYKTTPPVLDSDGSFFLVSKLTV | ASSYLSLTPEQWKSHR |
| | DKSRWQQGNVFSCSVMHEALHNHYTQKSLSL | DKSRWQQGNVFSCSVMHEALHNRYTQKSLSLSPGK | SYSCQVTHEGSTVEKT |
| | SPGK | | VAPTECS |
| 206 | SEQ ID NO: 784 | SEQ ID NO: 785 | SEQ ID NO: 753 |
| hCD4 | KKVVLGKKGDTVELTCTASQKKSIQFHWKNS | EVQLVESGGGLVQPGGSLRLSCAASGFTFNTYAMN | QAVVTQEPSLTVSPGG |
| D1D2 Fc | NQIKILGNQGSFLTKGPSKLNDRADSRRSLW | WVRQAPGKGLEWVGRIRSKYNNYATYYADSVKGRF | TVTLTCGSSTGAVTTG |
| AAS + SAV + R/ | DQGNFPLIIKNLKIEDSDTYICEVEDQKEEV | TISRDDSKNSLYLQMNSLRTEDTAVYYCVRHGNFG | HYANWVQQKPGQAPRG |
| huSP34.3.13 | QLLVFGLTANSDTHLLQGQSLTLTLESPPGS | HSYVSWFAYWGQGTLVTVSSASTKGPSVFPLAPSS | LIGGTSNRAPGVPARF |
| AAS + W + YTE | SPSVQCRSPRGKNIQGGKTLSVSQLELQDSG | KSTSGGTAALGCLVKDYFPEPVTVSWNSGALTSGV | SGSLLGGKAALTISGA |
| | TWTCTVLQNQKKVEFKIDIVVLAGSDKTHTC | HTFPAVLQSSGLYSLSSVVTVPSSSLGTQTYICNV | QPEDEAEYYCALWYSN |
| | PPCPAPEAAGGPSVFLFPPKPKDTLMISRTP | NHKPSNTKVDKKVEPKSCDKTHTCPPCPAPEAAGG | RWVFGGGTKLTVLGQP |
| | EVTCVVVDVSHEDPEVKFNWYVDGVEVHNAK | PSVFLFPPKPKDTLYITREPEVTOVVVDVSHEDPE | KAAPSVTLFPPSSEEL |
| | TKPREEQYNSTYRVVSVLTVLHQDWLNGKEY | VKFNWYVDGVEVHNAKTKPREEQYNSTYRVVSVLT | QANKATLVCLISDFYP |
| | KCKVSNKALPASIEKTISKAKGQPREPQVYT | VLHQDWLNGKEYKCKVSNKALPASIEKTISKAKGQ | GAVTVAWKADSSPVKA |
| | LPPSREEMTKNQVSLSCAVKGFYPSDIAVEW | PREPQVYTLPPSREEMTKNQVSLWCLVKGFYPSDI | GVETTTPSKQSNNKYA |
| | ESNGQPENNYKTTPPVLDSDGSFFLVSKLTV | AVEWESNGQPENNYKTTPPVLDSDGSFFLYSKLTV | ASSYLSLTPEQWKSHR |
| | DKSRWQQGNVFSCSVMHEALHNRYTQKSLSL | DKSRWQQGNVFSCSVMHEALHNHYTQKSLSLSPGK | SYSCQVTHEGSTVEKT |
| | SPGK | | VAPTECS |
| 207 | SEQ ID NO: 784 | SEQ ID NO: 786 | SEQ ID NO: 753 |
| hCD4 | KKVVLGKKGDTVELTCTASQKKSIQFHWKNS | EVQLVESGGGLVQPGGSLRLSCAASGFTFNTYAMN | QAVVTQEPSLTVSPGG |
| D1D2 Fc | NQIKILGNQGSFLTKGPSKLNDRADSRRSLW | WVRQAPGKGLEWVGRIRSKYNNYATYYADSVKGRF | TVTLTCGSSTGAVTTG |
| AAS + SAV + | DQGNFPLIIKNLKIEDSDTYICEVEDQKEEV | TISRDDSKNSLYLQMNSLRTEDTAVYYCVRHGNFG | HYANWVQQKPGQAPRG |
| R/ | QLLVFGLTANSDTHLLQGQSLTLTLESPPGS | HSYVSWFAYWGQGTLVTVSSASTKGPSVFPLAPSS | LIGGTSNRAPGVPARF |
| huSP34.3.13 | SPSVQCRSPRGKNIQGGKTLSVSQLELQDSG | KSTSGGTAALGCLVKDYFPEPVTVSWNSGALTSGV | SGSLLGGKAALTISGA |
| AAS + W | TWTCTVLQNQKKVEFKIDIVVLAGSDKTHTC | HTFPAVLQSSGLYSLSSVVTVPSSSLGTQTYICNV | QPEDEAEYYCALWYSN |
| | PPCPAPEAAGGPSVFLFPPKPKDTLMISRTP | NHKPSNTKVDKKVEPKSCDKTHTCPPCPAPEAAGG | RWVFGGGTKLTVLGQP |
| | EVTCVVVDVSHEDPEVKFNWYVDGVEVHNAK | PSVFLFPPKPKDTLMISRTPEVTOVVVDVSHEDPE | KAAPSVTLFPPSSEEL |
| | TKPREEQYNSTYRVVSVLTVLHQDWLNGKEY | VKFNWYVDGVEVHNAKTKPREEQYNSTYRVVSVLT | QANKATLVCLISDFYP |
| | KCKVSNKALPASIEKTISKAKGQPREPQVYT | VLHQDWLNGKEYKCKVSNKALPASIEKTISKAKGQ | GAVTVAWKADSSPVKA |
| | LPPSREEMTKNQVSLSCAVKGFYPSDIAVEW | PREPQVYTLPPSREEMTKNQVSLWCLVKGFYPSDI | GVETTTPSKQSNNKYA |
| | ESNGQPENNYKTTPPVLDSDGSFFLVSKLTV | AVEWESNGQPENNYKTTPPVLDSDGSFFLYSKLTV | ASSYLSLTPEQWKSHR |
| | DKSRWQQGNVFSCSVMHEALHNRYTQKSLSL | DKSRWQQGNVFSCSVMHEALHNHYTQKSLSLSPGK | SYSCQVTHEGSTVEKT |
| | SPGK | | VAPTECS |
| 208 | SEQ ID NO: 787 | SEQ ID NO: 786 | SEQ ID NO: 753 |
| hCD4 | KKVVLGKKGDTVELTCTASQKKSIQFHWKNS | EVQLVESGGGLVQPGGSLRLSCAASGFTFNTYAMN | QAVVTQEPSLTVSPGG |
| D1D2 Fc | NQIKILGNQGSFLTKGPSKLNDRADSRRSLW | WVRQAPGKGLEWVGRIRSKYNNYATYYADSVKGRF | TVTLTCGSSTGAVTTG |
| AAS + SAV/ | DQGNFPLIIKNLKIEDSDTYICEVEDQKEEV | TISRDDSKNSLYLQMNSLRTEDTAVYYCVRHGNFG | HYANWVQQKPGQAPRG |
| huSP34.3.13 | QLLVFGLTANSDTHLLQGQSLTLTLESPPGS | HSYVSWFAYWGQGTLVTVSSASTKGPSVFPLAPSS | LIGGTSNRAPGVPARF |
| AAS + W | SPSVQCRSPRGKNIQGGKTLSVSQLELQDSG | KSTSGGTAALGCLVKDYFPEPVTVSWNSGALTSGV | SGSLLGGKAALTISGA |
| | TWTCTVLQNQKKVEFKIDIVVLAGSDKTHTC | HTFPAVLQSSGLYSLSSVVTVPSSSLGTQTYICNV | QPEDEAEYYCALWYSN |
| | PPCPAPEAAGGPSVFLFPPKPKDTLMISRTP | NHKPSNTKVDKKVEPKSCDKTHTCPPCPAPEAAGG | RWVFGGGTKLTVLGQP |
| | EVTCVVVDVSHEDPEVKFNWYVDGVEVHNAK | PSVFLFPPKPKDTLMISRTPEVICVVVDVSHEDPE | KAAPSVTLFPPSSEEL |
| | TKPREEQYNSTYRVVSVLTVLHQDWLNGKEY | VKFNWYVDGVEVHNAKTKPREEQYNSTYRVVSVLT | QANKATLVCLISDFYP |
| | KCKVSNKALPASIEKTISKAKGQPREPQVYT | VLHQDWLNGKEYKCKVSNKALPASIEKTISKAKGQ | GAVTVAWKADSSPVKA |
| | LPPSREEMTKNQVSLSCAVKGFYPSDIAVEW | PREPQVYTLPPSREEMTKNQVSLWCLVKGFYPSDI | GVETTTPSKQSNNKYA |
| | ESNGQPENNYKTTPPVLDSDGSFFLVSKLTV | AVEWESNGQPENNYKTTPPVLDSDGSFFLYSKLTV | ASSYLSLTPEQWKSHR |
| | DKSRWQQGNVFSCSVMHEALHNHYTQKSLSL | DKSRWQQGNVFSCSVMHEALHNHYTQKSLSLSPGK | SYSCQVTHEGSTVEKT |
| | SPGK | | VAPTECS |
| 209 | SEQ ID NO: 788 | SEQ ID NO: 785 | SEQ ID NO: 753 |
| hCD4 | KKVVLGKKGDTVELTCTASQKKSIQFHWKNS | EVQLVESGGGLVQPGGSLRLSCAASGFTFNTYAMN | QAVVTQEPSLTVSPGG |
| D1D2 Fc | NQIKILGNQGSFLTKGPSKLNDRADSRRSLW | WVRQAPGKGLEWVGRIRSKYNNYATYYADSVKGRF | TVTLTCGSSTGAVTTG |
| AAS + SAV + | DQGNFPLIIKNLKIEDSDTYICEVEDQKEEV | TISRDDSKNSLYLQMNSLRTEDTAVYYCVRHGNFG | HYANWVQQKPGQAPRG |
| YTE/ | QLLVFGLTANSDTHLLQGQSLTLTLESPPGS | HSYVSWFAYWGQGTLVTVSSASTKGPSVFPLAPSS | LIGGTSNRAPGVPARF |
| huSP34.3.13 | SPSVQCRSPRGKNIQGGKTLSVSQLELQDSG | KSTSGGTAALGCLVKDYFPEPVTVSWNSGALTSGV | SGSLLGGKAALTISGA |
| AAS + W + YTE | TWTCTVLQNQKKVEFKIDIVVLAGSDKTHTC | HTFPAVLQSSGLYSLSSVVTVPSSSLGTQTYICNV | QPEDEAEYYCALWYSN |
| | PPCPAPEAAGGPSVFLFPPKPKDTLYITREP | NHKPSNTKVDKKVEPKSCDKTHTCPPCPAPEAAGG | RWVFGGGTKLTVLGQP |
| | EVTCVVVDVSHEDPEVKFNWYVDGVEVHNAK | PSVFLFPPKPKDTLYITREPEVTOVVVDVSHEDPE | KAAPSVTLFPPSSEEL |
| | TKPREEQYNSTYRVVSVLTVLHQDWLNGKEY | VKFNWYVDGVEVHNAKTKPREEQYNSTYRVVSVLT | QANKATLVCLISDFYP |
| | KCKVSNKALPASIEKTISKAKGQPREPQVYT | VLHQDWLNGKEYKCKVSNKALPASIEKTISKAKGQ | GAVTVAWKADSSPVKA |
| | LPPSREEMTKNQVSLSCAVKGFYPSDIAVEW | PREPQVYTLPPSREEMTKNQVSLWCLVKGFYPSDI | GVETTTPSKQSNNKYA |
| | ESNGQPENNYKTTPPVLDSDGSFFLVSKLTV | AVEWESNGQPENNYKTTPPVLDSDGSFFLYSKLTV | ASSYLSLTPEQWKSHR |
| | DKSRWQQGNVFSCSVMHEALHNHYTQKSLSL | DKSRWQQGNVFSCSVMHEALHNHYTQKSLSLSPGK | SYSCQVTHEGSTVEKT |
| | SPGK | | VAPTECS |
| 210 | SEQ ID NO: 783 | SEQ ID NO: 789 | SEQ ID NO: 761 |
| CD4 D1D2 | KKVVLGKKGDTVELTCTASQKKSIQFHWKNS | EVQLVESGGGLVQPGGSLRLSCAASGFTFNTYAMN | QAVVTQEPSLTVSPGG |
| Fc AAS | NQIKILGNQGSFLTKGPSKLNDRADSRRSLW | WVRQAPGKGLEWVGRIRSKYNNYATYYAASVKGRF | TVTLTCGSSTGAVTTG |
| W/ | DQGNFPLIIKNLKIEDSDTYICEVEDQKEEV | TISRDDSKNSLYLQMNSLKTEDTAMYYCVRHGNFG | HYANWVQQKPGQAPRG |
| huSP34.1.3 | QLLVFGLTANSDTHLLQGQSLTLTLESPPGS | NSYVSWFAYWGQGTLVTVSSASTKGPSVFPLAPSS | LIGGTNKRAPWTPARF |
| AAS + SAV + | SPSVQCRSPRGKNIQGGKTLSVSQLELQDSG | KSTSGGTAALGCLVKDYFPEPVTVSWNSGALTSGV | SGSLLGGKAALTLSGA |
| R | TWTCTVLQNQKKVEFKIDIVVLAGSDKTHTC | HTFPAVLQSSGLYSLSSVVTVPSSSLGTQTYICNV | QPEDEAEYYCALWYSN |
| | PPCPAPEAAGGPSVFLFPPKPKDTLMISRTP | NHKPSNTKVDKKVEPKSCDKTHTCPPCPAPEAAGG | LWVFGGGTKLTVLGQP |
| | EVTCVVVDVSHEDPEVKFNWYVDGVEVHNAK | PSVFLFPPKPKDTLMISRTPEVTOVVVDVSHEDPE | KAAPSVTLFPPSSEEL |
| | TKPREEQYNSTYRVVSVLTVLHQDWLNGKEY | VKFNWYVDGVEVHNAKTKPREEQYNSTYRVVSVLT | QANKATLVCLISDFYP |
| | KCKVSNKALPASIEKTISKAKGQPREPQVYT | VLHQDWLNGKEYKCKVSNKALPASIEKTISKAKGQ | GAVTVAWKADSSPVKA |
| | LPPSREEMTKNQVSLWCLVKGFYPSDIAVEW | PREPQVYTLPPSREEMTKNQVSLSCAVKGFYPSDI | GVETTTPSKQSNNKYA |
| | ESNGQPENNYKTTPPVLDSDGSFFLYSKLTV | AVEWESNGQPENNYKTTPPVLDSDGSFFLVSKLTV | ASSYLSLTPEQWKSHR |
| | DKSRWQQGNVFSCSVMHEALHNHYTQKSLSL | DKSRWQQGNVFSCSVMHEALHNRYTQKSLSLSPGK | SYSCQVTHEGSTVEKT |
| | SPGK | | VAPTECS |
| 211 | SEQ ID NO: 790 | SEQ ID NO: 789 | SEQ ID NO: 761 |
| hCD4- | KKVVLGKKGDTVELTCTASQKKSIQFHWKNS | EVQLVESGGGLVQPGGSLRLSCAASGFTFNTYAMN | QAVVTQEPSLTVSPGG |
| D1D2 Fc | NQIKILGNQGSFLTKGPSKLNDRADSRRSLW | WVRQAPGKGLEWVGRIRSKYNNYATYYAASVKGRF | TVTLTCGSSTGAVTTG |
| AAS + W + LS/ | DQGNFPLIIKNLKIEDSDTYICEVEDQKEEV | TISRDDSKNSLYLQMNSLKTEDTAMYYCVRHGNFG | HYANWVQQKPGQAPRG |
| huSP34.1.3 | QLLVFGLTANSDTHLLQGQSLTLTLESPPGS | NSYVSWFAYWGQGTLVTVSSASTKGPSVFPLAPSS | LIGGTNKRAPWTPARF |
| AAS + SAV + | SPSVQCRSPRGKNIQGGKTLSVSQLELQDSG | KSTSGGTAALGCLVKDYFPEPVTVSWNSGALTSGV | SGSLLGGKAALTLSGA |
| R | TWTCTVLQNQKKVEFKIDIVVLAGSDKTHTC | HTFPAVLQSSGLYSLSSVVTVPSSSLGTQTYICNV | QPEDEAEYYCALWYSN |
| | PPCPAPEAAGGPSVFLFPPKPKDTLMISRTP | NHKPSNTKVDKKVEPKSCDKTHTCPPCPAPEAAGG | LWVFGGGTKLTVLGQP |
| | EVTCVVVDVSHEDPEVKFNWYVDGVEVHNAK | PSVFLFPPKPKDTLMISRTPEVICVVVDVSHEDPE | KAAPSVTLFPPSSEEL |
| | TKPREEQYNSTYRVVSVLTVLHQDWLNGKEY | VKFNWYVDGVEVHNAKTKPREEQYNSTYRVVSVLT | QANKATLVCLISDFYP |
| | KCKVSNKALPASIEKTISKAKGQPREPQVYT | VLHQDWLNGKEYKCKVSNKALPASIEKTISKAKGQ | GAVTVAWKADSSPVKA |
| | LPPSREEMTKNQVSLWCLVKGFYPSDIAVEW | PREPQVYTLPPSREEMTKNQVSLSCAVKGFYPSDI | GVETTTPSKQSNNKYA |
| | ESNGQPENNYKTTPPVLDSDGSFFLYSKLTV | AVEWESNGQPENNYKTTPPVLDSDGSFFLVSKLTV | ASSYLSLTPEQWKSHR |
| | DKSRWQQGNVFSCSVLHEALHSHYTQKSLSL | DKSRWQQGNVFSCSVMHEALHNRYTQKSLSLSPGK | SYSCQVTHEGSTVEKT |
| | SPGK | | VAPTECS |
| 212 | SEQ ID NO: 790 | SEQ ID NO: 791 | |
| hCD4- | KKVVLGKKGDTVELTCTASQKKSIQFHWKNS | EVQLVESGGGLVQPGGSLRLSCAASGFTFNTYAMN | |
| D1D2 Fc | NQIKILGNQGSFLTKGPSKLNDRADSRRSLW | WVRQAPGKGLEWVGRIRSKYNNYATYYAASVKGRF | |
| AAS + W + LS/ | DQGNFPLIIKNLKIEDSDTYICEVEDQKEEV | TISRDDSKNSLYLQMNSLKTEDTAMYYCVRHGNFG | |
| huSP34.1.3scFv | QLLVFGLTANSDTHLLQGQSLTLTLESPPGS | NSYVSWFAYWGQGTLVTVSSGGGGSGGGGSGGGGS | |
| AAS + SAV + | SPSVQCRSPRGKNIQGGKTLSVSQLELQDSG | GGGGSQAVVTQEPSLTVSPGGTVTLTCGSSTGAVT | |
| R | TWTCTVLQNQKKVEFKIDIVVLAGSDKTHTC | TGHYANWVQQKPGQAPRGLIGGTNKRAPWTPARFS | |
| | PPCPAPEAAGGPSVFLFPPKPKDTLMISRTP | GSLLGGKAALTLSGAQPEDEAEYYCALWYSNLWVF | |
| | EVTCVVVDVSHEDPEVKFNWYVDGVEVHNAK | GGGTKLTVLEPKSSDKTHTCPPCPAPEAAGGPSVF | |
| | TKPREEQYNSTYRVVSVLTVLHQDWLNGKEY | LFPPKPKDTLMISRTPEVTCVVVDVSHEDPEVKFN | |
| | KCKVSNKALPASIEKTISKAKGQPREPQVYT | WYVDGVEVHNAKTKPREEQYNSTYRVVSVLTVLHQ | |
| | LPPSREEMTKNQVSLWCLVKGFYPSDIAVEW | DWLNGKEYKCKVSNKALPASIEKTISKAKGQPREP | |
| | ESNGQPENNYKTTPPVLDSDGSFFLYSKLTV | QVYTLPPSREEMTKNQVSLSCAVKGFYPSDIAVEW | |
| | DKSRWQQGNVFSCSVLHEALHSHYTQKSLSL | ESNGQPENNYKTTPPVLDSDGSFFLVSKLTVDKSR | |
| | SPGK | WQQGNVFSCSVMHEALHNRYTQKSLSLSPGK | |
| 213 | SEQ ID NO: 792 | SEQ ID NO: 793 | SEQ ID NO: 794 |
| hCD4- | EVQLVESGGGLVQPGGSLRLSCAASGFTFNT | KKVVLGKKGDTVELTCTASQKKSIQFHWKNSNQIK | KKVVLGKKGDTVELTC |
| D1D2 | YAMNWVRQAPGKGLEWVGRIRSKYNNYATYY | ILGNQGSFLTKGPSKLNDRADSRRSLWDQGNFPLI | TASQKKSIQFHWKNSN |
| (bivalent | AASVKGRFTISRDDSKNSLYLQMNSLKTEDT | IKNLKIEDSDTYICEVEDQKEEVQLLVFGLTANSD | QIKILGNQGSFLTKGP |
| AAS + W + LS/ | AMYYCVRHGNFGNSYVSWFAYWGQGTLVTVS | THLLQGQSLTLTLESPPGSSPSVQCRSPRGKNIQG | SKLNDRADSRRSLWDQ |
| husp34.1.3scFv | SGGGGSGGGGSGGGGSGGGGSQAVVTQEPSL | GKTLSVSQLELQDSGTWTCTVLQNQKKVEFKIDIV | GNFPLIIKNLKIEDSD |
| AAS + SAV + | TVSPGGTVTLTCGSSTGAVTTGHYANWVQQK | VLAGGGSGSSASTKGPSVFPLAPSSKSTSGGTAAL | TYICEVEDQKEEVQLL |
| R | PGQAPRGLIGGTNKRAPWTPARFSGSLLGGK | GCLVKDYFPEPVTVSWNSGALTSGVHTFPAVLQSS | VFGLTANSDTHLLQGQ |
| | AALTLSGAQPEDEAEYYCALWYSNLWVFGGG | GLYSLSSVVTVPSSSLGTQTYICNVNHKPSNTKVD | SLTLTLESPPGSSPSV |
| | TKLTVLEPKSSDKTHTCPPCPAPEAAGGPSV | KKVEPKSCDKTHTCPPCPAPEAAGGPSVFLFPPKP | QCRSPRGKNIQGGKTL |
| | FLFPPKPKDTLMISRTPEVTCVVVDVSHEDP | KDTLMISRTPEVTCVVVDVSHEDPEVKFNWYVDGV | SVSQLELQDSGTWTCT |
| | EVKFNWYVDGVEVHNAKTKPREEQYNSTYRV | EVHNAKTKPREEQYNSTYRVVSVLTVLHQDWLNGK | VLQNQKKVEFKIDIVV |
| | VSVLTVLHQDWLNGKEYKCKVSNKALPASIE | EYKCKVSNKALPASIEKTISKAKGQPREPQVYTLP | LAGGGSGKRTVAAPSV |
| | KTISKAKGQPREPQVYTLPPSREEMTKNQVS | PSREEMTKNQVSLWCLVKGFYPSDIAVEWESNGQP | FIFPPSDEQLKSGTAS |
| | LSCAVKGFYPSDIAVEWESNGQPENNYKTTP | ENNYKTTPPVLDSDGSFFLYSKLTVDKSRWQQGNV | VVCLLNNFYPREAKVQ |
| | PVLDSDGSFFLVSKLTVDKSRWQQGNVFSCS | FSCSVLHEALHSHYTQKSLSLSPGK | WKVDNALQSGNSQESV |
| | VMHEALHNRYTQKSLSLSPGK | | TEQDSKDSTYSLSSTL |
| | | | TLSKADYEKHKVYACE |
| | | | VTHQGLSSPVTKSFNR |
| | | | GEC |
| 214 | SEQ ID NO: 795 | SEQ ID NO: 796 | SEQ ID NO: 794 |
| hCD4 | EVQLVESGGGLVQPGGSLRLSCAASGFTFNT | KKVVLGKKGDTVELTCTASQKKSIQFHWKNSNQIK | KKVVLGKKGDTVELTC |
| D1D2 | YAMNWVRQAPGKGLEWVGRIRSKYNNYATYY | ILGNQGSFLTKGPSKLNDRADSRRSLWDQGNFPLI | TASQKKSIQFHWKNSN |
| (bivalent) | ADSVKGRFTISRDDSKNSLYLQMNSLRTEDT | IKNLKIEDSDTYICEVEDQKEEVQLLVFGLTANSD | QIKILGNQGSFLTKGP |
| AAS + SAV + R/ | AVYYCVRHGNFGHSYVSWFAYWGQGTLVTVS | THLLQGQSLTLTLESPPGSSPSVQCRSPRGKNIQG | SKLNDRADSRRSLWDQ |
| huSP34.3.13scFv | SGGGGSGGGGSGGGGSGGGGSQAVVTQEPSL | GKTLSVSQLELQDSGTWTCTVLQNQKKVEFKIDIV | GNFPLIIKNLKIEDSD |
| AAS + W + YTE | TVSPGGTVTLTCGSSTGAVTTGHYANWVQQK | VLAGGGSGSSASTKGPSVFPLAPSSKSTSGGTAAL | TYICEVEDQKEEVQLL |
| | PGQAPRGLIGGTSNRAPGVPARFSGSLLGGK | GCLVKDYFPEPVTVSWNSGALTSGVHTFPAVLQSS | VFGLTANSDTHLLQGQ |
| | AALTISGAQPEDEAEYYCALWYSNRWVFGGG | GLYSLSSVVTVPSSSLGTQTYICNVNHKPSNTKVD | SLTLTLESPPGSSPSV |
| | TKLTVLEPKSSDKTHTCPPCPAPEAAGGPSV | KKVEPKSCDKTHTCPPCPAPEAAGGPSVFLFPPKP | QCRSPRGKNIQGGKTL |
| | FLFPPKPKDTLYITREPEVTCVVVDVSHEDP | KDTLMISRTPEVTCVVVDVSHEDPEVKFNWYVDGV | SVSQLELQDSGTWTCT |
| | EVKFNWYVDGVEVHNAKTKPREEQYNSTYRV | EVHNAKTKPREEQYNSTYRVVSVLTVLHQDWLNGK | VLQNQKKVEFKIDIVV |
| | VSVLTVLHQDWLNGKEYKCKVSNKALPASIE | EYKCKVSNKALPASIEKTISKAKGQPREPQVYTLP | LAGGGSGKRTVAAPSV |
| | KTISKAKGQPREPQVYTLPPSREEMTKNQVS | PSREEMTKNQVSLSCAVKGFYPSDIAVEWESNGQP | FIFPPSDEQLKSGTAS |
| | LWCLVKGFYPSDIAVEWESNGQPENNYKTTP | ENNYKTTPPVLDSDGSFFLVSKLTVDKSRWQQGNV | VVCLLNNFYPREAKVQ |
| | PVLDSDGSFFLYSKLTVDKSRWQQGNVFSCS | FSCSVMHEALHNRYTQKSLSLSPGK | WKVDNALQSGNSQESV |
| | VMHEALHNHYTQKSLSLSPGK | | TEQDSKDSTYSLSSTL |
| | | | TLSKADYEKHKVYACE |
| | | | VTHQGLSSPVTKSFNR |
| | | | GEC |
| 215 | SEQ ID NO: 797 | SEQ ID NO: 796 | SEQ ID NO: 794 |
| hCD4 | EVQLVESGGGLVQPGGSLRLSCAASGFTFNT | KKVVLGKKGDTVELTCTASQKKSIQFHWKNSNQIK | KKVVLGKKGDTVELTC |
| D1D2 | YAMNWVRQAPGKGLEWVGRIRSKYNNYATYY | ILGNQGSFLTKGPSKLNDRADSRRSLWDQGNFPLI | TASQKKSIQFHWKNSN |
| (bivalent) | ADSVKGRFTISRDDSKNSLYLQMNSLRTEDT | IKNLKIEDSDTYICEVEDQKEEVQLLVFGLTANSD | QIKILGNQGSFLTKGP |
| AAS + SAV + R/ | AVYYCVRHGNFGHSYVSWFAYWGQGTLVTVS | THLLQGQSLTLTLESPPGSSPSVQCRSPRGKNIQG | SKLNDRADSRRSLWDQ |
| huSP34.3.13scFv | SGGGGSGGGGSGGGGSGGGGSQAVVTQEPSL | GKTLSVSQLELQDSGTWTCTVLQNQKKVEFKIDIV | GNFPLIIKNLKIEDSD |
| AAS + W | TVSPGGTVTLTCGSSTGAVTTGHYANWVQQK | VLAGGGSGSSASTKGPSVFPLAPSSKSTSGGTAAL | TYICEVEDQKEEVQLL |
| | PGQAPRGLIGGTSNRAPGVPARFSGSLLGGK | GCLVKDYFPEPVTVSWNSGALTSGVHTFPAVLQSS | VFGLTANSDTHLLQGQ |
| | AALTISGAQPEDEAEYYCALWYSNRWVFGGG | GLYSLSSVVTVPSSSLGTQTYICNVNHKPSNTKVD | SLTLTLESPPGSSPSV |
| | TKLTVLEPKSSDKTHTCPPCPAPEAAGGPSV | KKVEPKSCDKTHTCPPCPAPEAAGGPSVFLFPPKP | QCRSPRGKNIQGGKTL |
| | FLFPPKPKDTLMISRTPEVICVVVDVSHEDP | KDTLMISRTPEVTCVVVDVSHEDPEVKFNWYVDGV | SVSQLELQDSGTWTCT |
| | EVKFNWYVDGVEVHNAKTKPREEQYNSTYRV | EVHNAKTKPREEQYNSTYRVVSVLTVLHQDWLNGK | VLQNQKKVEFKIDIVV |
| | VSVLTVLHQDWLNGKEYKCKVSNKALPASIE | EYKCKVSNKALPASIEKTISKAKGQPREPQVYTLP | LAGGGSGKRTVAAPSV |
| | KTISKAKGQPREPQVYTLPPSREEMTKNQVS | PSREEMTKNQVSLSCAVKGFYPSDIAVEWESNGQP | FIFPPSDEQLKSGTAS |
| | LWCLVKGFYPSDIAVEWESNGQPENNYKTTP | ENNYKTTPPVLDSDGSFFLVSKLTVDKSRWQQGNV | VVCLLNNFYPREAKVQ |
| | PVLDSDGSFFLYSKLTVDKSRWQQGNVFSCS | FSCSVMHEALHNRYTQKSLSLSPGK | WKVDNALQSGNSQESV |
| | VMHEALHNHYTQKSLSLSPGK | | TEQDSKDSTYSLSSTL |
| | | | TLSKADYEKHKVYACE |
| | | | VTHQGLSSPVTKSFNR |
| | | | GEC |
| 216 | SEQ ID NO: 797 | SEQ ID NO: 798 | SEQ ID NO: 794 |
| hCD4 | EVQLVESGGGLVQPGGSLRLSCAASGFTFNT | KKVVLGKKGDTVELTCTASQKKSIQFHWKNSNQIK | KKVVLGKKGDTVELTC |
| D1D2 | YAMNWVRQAPGKGLEWVGRIRSKYNNYATYY | ILGNQGSFLTKGPSKLNDRADSRRSLWDQGNFPLI | TASQKKSIQFHWKNSN |
| (bivalent) | ADSVKGRFTISRDDSKNSLYLQMNSLRTEDT | IKNLKIEDSDTYICEVEDQKEEVQLLVFGLTANSD | QIKILGNQGSFLTKGP |
| AAS + SAV/ | AVYYCVRHGNFGHSYVSWFAYWGQGTLVTVS | THLLQGQSLTLTLESPPGSSPSVQCRSPRGKNIQG | SKLNDRADSRRSLWDQ |
| huSP34.3.13scFv | SGGGGSGGGGSGGGGSGGGGSQAVVTQEPSL | GKTLSVSQLELQDSGTWTCTVLQNQKKVEFKIDIV | GNFPLIIKNLKIEDSD |
| AAS + W | TVSPGGTVTLICGSSTGAVTTGHYANWVQQK | VLAGGGSGSSASTKGPSVFPLAPSSKSTSGGTAAL | TYICEVEDQKEEVQLL |
| | PGQAPRGLIGGTSNRAPGVPARFSGSLLGGK | GCLVKDYFPEPVTVSWNSGALTSGVHTFPAVLQSS | VFGLTANSDTHLLQGQ |
| | AALTISGAQPEDEAEYYCALWYSNRWVFGGG | GLYSLSSVVTVPSSSLGTQTYICNVNHKPSNTKVD | SLTLTLESPPGSSPSV |
| | TKLTVLEPKSSDKTHTCPPCPAPEAAGGPSV | KKVEPKSCDKTHTCPPCPAPEAAGGPSVFLFPPKP | QCRSPRGKNIQGGKTL |
| | FLFPPKPKDTLMISRTPEVICVVVDVSHEDP | KDTLMISRTPEVTCVVVDVSHEDPEVKFNWYVDGV | SVSQLELQDSGTWTCT |
| | EVKFNWYVDGVEVHNAKTKPREEQYNSTYRV | EVHNAKTKPREEQYNSTYRVVSVLTVLHQDWLNGK | VLQNQKKVEFKIDIVV |
| | VSVLTVLHQDWLNGKEYKCKVSNKALPASIE | EYKCKVSNKALPASIEKTISKAKGQPREPQVYTLP | LAGGGSGKRTVAAPSV |
| | KTISKAKGQPREPQVYTLPPSREEMTKNQVS | PSREEMTKNQVSLSCAVKGFYPSDIAVEWESNGQP | FIFPPSDEQLKSGTAS |
| | LWCLVKGFYPSDIAVEWESNGQPENNYKTTP | ENNYKTTPPVLDSDGSFFLVSKLTVDKSRWQQGNV | VVCLLNNFYPREAKVQ |
| | PVLDSDGSFFLYSKLTVDKSRWQQGNVFSCS | FSCSVMHEALHNHYTQKSLSLSPGK | WKVDNALQSGNSQESV |
| | VMHEALHNHYTQKSLSLSPGK | | TEQDSKDSTYSLSSTL |
| | | | TLSKADYEKHKVYACE |
| | | | VTHQGLSSPVTKSFNR |
| | | | GEC |
| 217 | SEQ ID NO: 795 | SEQ ID NO: 799 | SEQ ID NO: 794 |
| hCD4 | EVQLVESGGGLVQPGGSLRLSCAASGFTFNT | KKVVLGKKGDTVELTCTASQKKSIQFHWKNSNQIK | KKVVLGKKGDTVELTC |
| D1D2 | YAMNWVRQAPGKGLEWVGRIRSKYNNYATYY | ILGNQGSFLTKGPSKLNDRADSRRSLWDQGNFPLI | TASQKKSIQFHWKNSN |
| (bivalent) | ADSVKGRFTISRDDSKNSLYLQMNSLRTEDT | IKNLKIEDSDTYICEVEDQKEEVQLLVFGLTANSD | QIKILGNQGSFLTKGP |
| AAS + SAV + | AVYYCVRHGNFGHSYVSWFAYWGQGTLVTVS | THLLQGQSLTLTLESPPGSSPSVQCRSPRGKNIQG | SKLNDRADSRRSLWDQ |
| YTE/ | SGGGGSGGGGSGGGGSGGGGSQAVVTQEPSL | GKTLSVSQLELQDSGTWTCTVLQNQKKVEFKIDIV | GNFPLIIKNLKIEDSD |
| huSP34.3.13scFv | TVSPGGTVTLTCGSSTGAVTTGHYANWVQQK | VLAGGGSGSSASTKGPSVFPLAPSSKSTSGGTAAL | TYICEVEDQKEEVQLL |
| AAS + W + YTE | PGQAPRGLIGGTSNRAPGVPARFSGSLLGGK | GCLVKDYFPEPVTVSWNSGALTSGVHTFPAVLQSS | VFGLTANSDTHLLQGQ |
| | AALTISGAQPEDEAEYYCALWYSNRWVFGGG | GLYSLSSVVTVPSSSLGTQTYICNVNHKPSNTKVD | SLTLTLESPPGSSPSV |
| | TKLTVLEPKSSDKTHTCPPCPAPEAAGGPSV | KKVEPKSCDKTHTCPPCPAPEAAGGPSVFLFPPKP | QCRSPRGKNIQGGKTL |
| | FLFPPKPKDTLYITREPEVTCVVVDVSHEDP | KDTLYITREPEVTCVVVDVSHEDPEVKFNWYVDGV | SVSQLELQDSGTWTCT |
| | EVKFNWYVDGVEVHNAKTKPREEQYNSTYRV | EVHNAKTKPREEQYNSTYRVVSVLTVLHQDWLNGK | VLQNQKKVEFKIDIVV |
| | VSVLTVLHQDWLNGKEYKCKVSNKALPASIE | EYKCKVSNKALPASIEKTISKAKGQPREPQVYTLP | LAGGGSGKRTVAAPSV |
| | KTISKAKGQPREPQVYTLPPSREEMTKNQVS | PSREEMTKNQVSLSCAVKGFYPSDIAVEWESNGQP | FIFPPSDEQLKSGTAS |
| | LWCLVKGFYPSDIAVEWESNGQPENNYKTTP | ENNYKTTPPVLDSDGSFFLVSKLTVDKSRWQQGNV | VVCLLNNFYPREAKVQ |
| | PVLDSDGSFFLYSKLTVDKSRWQQGNVFSCS | FSCSVMHEALHNHYTQKSLSLSPGK | WKVDNALQSGNSQESV |
| | VMHEALHNHYTQKSLSLSPGK | | TEQDSKDSTYSLSSTL |
| | | | TLSKADYEKHKVYACE |
| | | | VTHQGLSSPVTKSFNR |
| | | | GEC |
| 218 | SEQ ID NO: 800 | SEQ ID NO: 801 | SEQ ID NO: 802 |
| h3BNC117.52.64 | EVQLVESGGGLVQPGGSLRLSCAASGFTFNT | QVQLLQSGAAVTKPGASVRVSCEASGYNIRDYFIH | DIQMTQSPSSLSASVG |
| AAS + SAV + | YAMNWVRQAPGKGLEWVGRIRSKYNNYATYY | WWRQAPGQGLQWVGWINPKTGQPNNPRQFQGRVSL | DTATITCQANGYLNWY |
| YTE/ | ADSVKGRFTISRDDSKNSLYLQMNSLRTEDT | TRHASFDFDTFSFYMDLKALRSDDTAVYFCARQRS | QQRRGKAPKLLIYDGS |
| huSP34.3.13scFv | AVYYCVRHGNFGHSYVSWFAYWGQGTLVTVS | DYWDFDVWGSGTQVTVSSASTKGPSVFPLAPSSKS | KLERGVPSRFSGRRWG |
| AAS + W + YTE | SGGGGSGGGGSGGGGSGGGGSQAVVTQEPSL | TSGGTAALGCLVKDYFPEPVTVSWNSGALTSGVHT | QEYNLTINNLQPEDIA |
| | TVSPGGTVTLTCGSSTGAVTTGHYANWVQQK | FPAVLQSSGLYSLSSVVTVPSSSLGTQTYICNVNH | TYFCQVYEFVVPGTRL |
| | PGQAPRGLIGGTSNRAPGVPARFSGSLLGGK | KPSNTKVDKKVEPKSCDKTHTCPPCPAPEAAGGPS | DLKRTVAAPSVFIFPP |
| | AALTISGAQPEDEAEYYCALWYSNRWVFGGG | VFLFPPKPKDTLYITREPEVTCVVVDVSHEDPEVK | SDEQLKSGTASVVCLL |
| | TKLTVLEPKSSDKTHTCPPCPAPEAAGGPSV | FNWYVDGVEVHNAKTKPREEQYNSTYRVVSVLTVL | NNFYPREAKVQWKVDN |
| | FLFPPKPKDTLYITREPEVTCVVVDVSHEDP | HQDWLNGKEYKCKVSNKALPASIEKTISKAKGQPR | ALQSGNSQESVTEQDS |
| | EVKFNWYVDGVEVHNAKTKPREEQYNSTYRV | EPQVYTLPPSREEMTKNQVSLSCAVKGFYPSDIAV | KDSTYSLSSTLTLSKA |
| | VSVLTVLHQDWLNGKEYKCKVSNKALPASIE | EWESNGQPENNYKTTPPVLDSDGSFFLVSKLTVDK | DYEKHKVYACEVTHQG |
| | KTISKAKGQPREPQVYTLPPSREEMTKNQVS | SRWQQGNVFSCSVMHEALHNHYTQKSLSLSPGK | LSSPVTKSFNRGEC |
| | LWCLVKGFYPSDIAVEWESNGQPENNYKTTP | | |
| | PVLDSDGSFFLYSKLTVDKSRWQQGNVFSCS | | |
| | VMHEALHNHYTQKSLSLSPGK | | |
| 219 | SEQ ID NO: 800 | SEQ ID NO: 803 | SEQ ID NO: 802 |
| h3BNC117.52.64 | EVQLVESGGGLVQPGGSLRLSCAASGFTFNT | QVQLLQSGAAVTKPGASVRVSCEASGYNIRDYFIH | DIQMTQSPSSLSASVG |
| AAS + SAV + R/ | YAMNWVRQAPGKGLEWVGRIRSKYNNYATYY | WWRQAPGQGLQWVGWINPKTGQPNNPRQFQGRVSL | DTATITCQANGYLNWY |
| huSP34.3.13scFv | ADSVKGRFTISRDDSKNSLYLQMNSLRTEDT | TRHASFDFDTFSFYMDLKALRSDDTAVYFCARQRS | QQRRGKAPKLLIYDGS |
| AAS + W + YTE | AVYYCVRHGNFGHSYVSWFAYWGQGTLVTVS | DYWDFDVWGSGTQVTVSSASTKGPSVFPLAPSSKS | KLERGVPSRFSGRRWG |
| | SGGGGSGGGGSGGGGSGGGGSQAVVTQEPSL | TSGGTAALGCLVKDYFPEPVTVSWNSGALTSGVHT | QEYNLTINNLQPEDIA |
| | TVSPGGTVTLTCGSSTGAVTTGHYANWVQQK | FPAVLQSSGLYSLSSVVTVPSSSLGTQTYICNVNH | TYFCQVYEFVVPGTRL |
| | PGQAPRGLIGGTSNRAPGVPARFSGSLLGGK | KPSNTKVDKKVEPKSCDKTHTCPPCPAPEAAGGPS | DLKRTVAAPSVFIFPP |
| | AALTISGAQPEDEAEYYCALWYSNRWVFGGG | VFLFPPKPKDTLMISRTPEVTCVVVDVSHEDPEVK | SDEQLKSGTASVVCLL |
| | TKLTVLEPKSSDKTHTCPPCPAPEAAGGPSV | FNWYVDGVEVHNAKTKPREEQYNSTYRVVSVLTVL | NNFYPREAKVQWKVDN |
| | FLFPPKPKDTLYITREPEVTCVVVDVSHEDP | HQDWLNGKEYKCKVSNKALPASIEKTISKAKGQPR | ALQSGNSQESVTEQDS |
| | EVKFNWYVDGVEVHNAKTKPREEQYNSTYRV | EPQVYTLPPSREEMTKNQVSLSCAVKGFYPSDIAV | KDSTYSLSSTLTLSKA |
| | VSVLTVLHQDWLNGKEYKCKVSNKALPASIE | EWESNGQPENNYKTTPPVLDSDGSFFLVSKLTVDK | DYEKHKVYACEVTHQG |
| | KTISKAKGQPREPQVYTLPPSREEMTKNQVS | SRWQQGNVFSCSVMHEALHNRYTQKSLSLSPGK | LSSPVTKSFNRGEC |
| | LWCLVKGFYPSDIAVEWESNGQPENNYKTTP | | |
| | PVLDSDGSFFLYSKLTVDKSRWQQGNVFSCS | | |
| | VMHEALHNHYTQKSLSLSPGK | | |
| 220 | SEQ ID NO: 804 | SEQ ID NO: 803 | SEQ ID NO: 802 |
| h3BNC117.52.64 | EVQLVESGGGLVQPGGSLRLSCAASGFTFNT | QVQLLQSGAAVTKPGASVRVSCEASGYNIRDYFIH | DIQMTQSPSSLSASVG |
| AAS + SAV + | YAMNWVRQAPGKGLEWVGRIRSKYNNYATYY | WWRQAPGQGLQWVGWINPKTGQPNNPRQFQGRVSL | DTATITCQANGYLNWY |
| R/ | ADSVKGRFTISRDDSKNSLYLQMNSLRTEDT | TRHASFDFDTFSFYMDLKALRSDDTAVYFCARQRS | QQRRGKAPKLLIYDGS |
| huSP34.3.13scFv | AVYYCVRHGNFGHSYVSWFAYWGQGTLVTVS | DYWDFDVWGSGTQVTVSSASTKGPSVFPLAPSSKS | KLERGVPSRFSGRRWG |
| AAS + W | SGGGGSGGGGSGGGGSGGGGSQAVVTQEPSL | TSGGTAALGCLVKDYFPEPVTVSWNSGALTSGVHT | QEYNLTINNLQPEDIA |
| | TVSPGGTVTLTCGSSTGAVTTGHYANWVQQK | FPAVLQSSGLYSLSSVVTVPSSSLGTQTYICNVNH | TYFCQVYEFVVPGTRL |
| | PGQAPRGLIGGTSNRAPGVPARFSGSLLGGK | KPSNTKVDKKVEPKSCDKTHTCPPCPAPEAAGGPS | DLKRTVAAPSVFIFPP |
| | AALTISGAQPEDEAEYYCALWYSNRWVFGGG | VFLFPPKPKDTLMISRTPEVTCVVVDVSHEDPEVK | SDEQLKSGTASVVCLL |
| | TKLTVLEPKSSDKTHTCPPCPAPEAAGGPSV | FNWYVDGVEVHNAKTKPREEQYNSTYRVVSVLTVL | NNFYPREAKVQWKVDN |
| | FLFPPKPKDTLMISRTPEVICVVVDVSHEDP | HQDWLNGKEYKCKVSNKALPASIEKTISKAKGQPR | ALQSGNSQESVTEQDS |
| | EVKFNWYVDGVEVHNAKTKPREEQYNSTYRV | EPQVYTLPPSREEMTKNQVSLSCAVKGFYPSDIAV | KDSTYSLSSTLTLSKA |
| | VSVLTVLHQDWLNGKEYKCKVSNKALPASIE | EWESNGQPENNYKTTPPVLDSDGSFFLVSKLTVDK | DYEKHKVYACEVTHQG |
| | KTISKAKGQPREPQVYTLPPSREEMTKNQVS | SRWQQGNVFSCSVMHEALHNRYTQKSLSLSPGK | LSSPVTKSFNRGEC |
| | LWCLVKGFYPSDIAVEWESNGQPENNYKTTP | | |
| | PVLDSDGSFFLYSKLTVDKSRWQQGNVFSCS | | |
| | VMHEALHNHYTQKSLSLSPGK | | |
| 221 | SEQ ID NO: 804 | SEQ ID NO: 805 | SEQ ID NO: 802 |
| h3BNC117.52.64 | EVQLVESGGGLVQPGGSLRLSCAASGFTFNT | QVQLLQSGAAVTKPGASVRVSCEASGYNIRDYFIH | DIQMTQSPSSLSASVG |
| AAS + SAV/ | YAMNWVRQAPGKGLEWVGRIRSKYNNYATYY | WWRQAPGQGLQWVGWINPKTGQPNNPRQFQGRVSL | DTATITCQANGYLNWY |
| huSP34.3.13scFv | ADSVKGRFTISRDDSKNSLYLQMNSLRTEDT | TRHASFDFDTFSFYMDLKALRSDDTAVYFCARQRS | QQRRGKAPKLLIYDGS |
| AAS + W | AVYYCVRHGNFGHSYVSWFAYWGQGTLVTVS | DYWDFDVWGSGTQVTVSSASTKGPSVFPLAPSSKS | KLERGVPSRFSGRRWG |
| | SGGGGSGGGGSGGGGSGGGGSQAVVTQEPSL | TSGGTAALGCLVKDYFPEPVTVSWNSGALTSGVHT | QEYNLTINNLQPEDIA |
| | TVSPGGTVTLTCGSSTGAVTTGHYANWVQQK | FPAVLQSSGLYSLSSVVTVPSSSLGTQTYICNVNH | TYFCQVYEFVVPGTRL |
| | PGQAPRGLIGGTSNRAPGVPARFSGSLLGGK | KPSNTKVDKKVEPKSCDKTHTCPPCPAPEAAGGPS | DLKRTVAAPSVFIFPP |
| | AALTISGAQPEDEAEYYCALWYSNRWVFGGG | VFLFPPKPKDTLMISRTPEVTCVVVDVSHEDPEVK | SDEQLKSGTASVVCLL |
| | TKLTVLEPKSSDKTHTCPPCPAPEAAGGPSV | FNWYVDGVEVHNAKTKPREEQYNSTYRVVSVLTVL | NNFYPREAKVQWKVDN |
| | FLFPPKPKDTLMISRTPEVICVVVDVSHEDP | HQDWLNGKEYKCKVSNKALPASIEKTISKAKGQPR | ALQSGNSQESVTEQDS |
| | EVKFNWYVDGVEVHNAKTKPREEQYNSTYRV | EPQVYTLPPSREEMTKNQVSLSCAVKGFYPSDIAV | KDSTYSLSSTLTLSKA |
| | VSVLTVLHQDWLNGKEYKCKVSNKALPASIE | EWESNGQPENNYKTTPPVLDSDGSFFLVSKLTVDK | DYEKHKVYACEVTHQG |
| | KTISKAKGQPREPQVYTLPPSREEMTKNQVS | SRWQQGNVFSCSVMHEALHNHYTQKSLSLSPGK | LSSPVTKSFNRGEC |
| | LWCLVKGFYPSDIAVEWESNGQPENNYKTTP | | |
| | PVLDSDGSFFLYSKLTVDKSRWQQGNVFSCS | | |
| | VMHEALHNHYTQKSLSLSPGK | | |
| 222 | SEQ ID NO: 806 | SEQ ID NO: 801 | SEQ ID NO: 802 |
| h3BNC117.52.64 | EVQLVESGGGLVQPGGSLRLSCAASGFTFNT | QVQLLQSGAAVTKPGASVRVSCEASGYNIRDYFIH | DIQMTQSPSSLSASVG |
| AAS + SAV + | YAMNWVRQAPGKGLEWVGRIRSKYNNYATYY | WWRQAPGQGLQWVGWINPKTGQPNNPRQFQGRVSL | DTATITCQANGYLNWY |
| YTE/ | ADSVKSRFTISRDDSKNSLYLEMNSLRTEDT | TRHASFDFDTFSFYMDLKALRSDDTAVYFCARQRS | QQRRGKAPKLLIYDGS |
| huSP34.39.13scFv | AVYYCVRHGNFGHSYVSWFAYWGQGTLVTVS | DYWDFDVWGSGTQVTVSSASTKGPSVFPLAPSSKS | KLERGVPSRFSGRRWG |
| AAS + W + YTE | SGGGGSGGGGSGGGGSGGGGSQAVVTQEPSL | TSGGTAALGCLVKDYFPEPVTVSWNSGALTSGVHT | QEYNLTINNLQPEDIA |
| | TVSPGGTVTLTCGSSTGAVTTGHYANWVQQK | FPAVLQSSGLYSLSSVVTVPSSSLGTQTYICNVNH | TYFCQVYEFVVPGTRL |
| | PGQAPRGLIGGTSNRAPGVPARFSGSLLGGK | KPSNTKVDKKVEPKSCDKTHTCPPCPAPEAAGGPS | DLKRTVAAPSVFIFPP |
| | AALTISGAQPEDEAEYYCALWYSNRWVFGGG | VFLFPPKPKDTLYITREPEVTCVVVDVSHEDPEVK | SDEQLKSGTASVVCLL |
| | TKLTVLEPKSSDKTHTCPPCPAPEAAGGPSV | FNWYVDGVEVHNAKTKPREEQYNSTYRVVSVLTVL | NNFYPREAKVQWKVDN |
| | FLFPPKPKDTLYITREPEVTCVVVDVSHEDP | HQDWLNGKEYKCKVSNKALPASIEKTISKAKGQPR | ALQSGNSQESVTEQDS |
| | EVKFNWYVDGVEVHNAKTKPREEQYNSTYRV | EPQVYTLPPSREEMTKNQVSLSCAVKGFYPSDIAV | KDSTYSLSSTLTLSKA |
| | VSVLTVLHQDWLNGKEYKCKVSNKALPASIE | EWESNGQPENNYKTTPPVLDSDGSFFLVSKLTVDK | DYEKHKVYACEVTHQG |
| | KTISKAKGQPREPQVYTLPPSREEMTKNQVS | SRWQQGNVFSCSVMHEALHNHYTQKSLSLSPGK | LSSPVTKSFNRGEC |
| | LWCLVKGFYPSDIAVEWESNGQPENNYKTTP | | |
| | PVLDSDGSFFLYSKLTVDKSRWQQGNVFSCS | | |
| | VMHEALHNHYTQKSLSLSPGK | | |
| 223 | SEQ ID NO: 806 | SEQ ID NO: 803 | SEQ ID NO: 802 |
| h3BNC117.52.64 | EVQLVESGGGLVQPGGSLRLSCAASGFTFNT | QVQLLQSGAAVTKPGASVRVSCEASGYNIRDYFIH | DIQMTQSPSSLSASVG |
| AAS + SAV + | YAMNWVRQAPGKGLEWVGRIRSKYNNYATYY | WWRQAPGQGLQWVGWINPKTGQPNNPRQFQGRVSL | DTATITCQANGYLNWY |
| R/ | ADSVKSRFTISRDDSKNSLYLEMNSLRTEDT | TRHASFDFDTFSFYMDLKALRSDDTAVYFCARQRS | QQRRGKAPKLLIYDGS |
| huSP34.39.13scFv | AVYYCVRHGNFGHSYVSWFAYWGQGTLVTVS | DYWDFDVWGSGTQVTVSSASTKGPSVFPLAPSSKS | KLERGVPSRFSGRRWG |
| AAS + W + YTE | SGGGGSGGGGSGGGGSGGGGSQAVVTQEPSL | TSGGTAALGCLVKDYFPEPVTVSWNSGALTSGVHT | QEYNLTINNLQPEDIA |
| | TVSPGGTVTLTCGSSTGAVTTGHYANWVQQK | FPAVLQSSGLYSLSSVVTVPSSSLGTQTYICNVNH | TYFCQVYEFVVPGTRL |
| | PGQAPRGLIGGTSNRAPGVPARFSGSLLGGK | KPSNTKVDKKVEPKSCDKTHTCPPCPAPEAAGGPS | DLKRTVAAPSVFIFPP |
| | AALTISGAQPEDEAEYYCALWYSNRWVFGGG | VFLFPPKPKDTLMISRTPEVTCVVVDVSHEDPEVK | SDEQLKSGTASVVCLL |
| | TKLTVLEPKSSDKTHTCPPCPAPEAAGGPSV | FNWYVDGVEVHNAKTKPREEQYNSTYRVVSVLTVL | NNFYPREAKVQWKVDN |
| | FLFPPKPKDTLYITREPEVTCVVVDVSHEDP | HQDWLNGKEYKCKVSNKALPASIEKTISKAKGQPR | ALQSGNSQESVTEQDS |
| | EVKFNWYVDGVEVHNAKTKPREEQYNSTYRV | EPQVYTLPPSREEMTKNQVSLSCAVKGFYPSDIAV | KDSTYSLSSTLTLSKA |
| | VSVLTVLHQDWLNGKEYKCKVSNKALPASIE | EWESNGQPENNYKTTPPVLDSDGSFFLVSKLTVDK | DYEKHKVYACEVTHQG |
| | KTISKAKGQPREPQVYTLPPSREEMTKNQVS | SRWQQGNVFSCSVMHEALHNRYTQKSLSLSPGK | LSSPVTKSFNRGEC |
| | LWCLVKGFYPSDIAVEWESNGQPENNYKTTP | | |
| | PVLDSDGSFFLYSKLTVDKSRWQQGNVFSCS | | |
| | VMHEALHNHYTQKSLSLSPGK | | |
| 224 | SEQ ID NO: 807 | SEQ ID NO: 803 | SEQ ID NO: 802 |
| h3BNC117.52.64 | EVQLVESGGGLVQPGGSLRLSCAASGFTFNT | QVQLLQSGAAVTKPGASVRVSCEASGYNIRDYFIH | DIQMTQSPSSLSASVG |
| AAS + SAV + | YAMNWVRQAPGKGLEWVGRIRSKYNNYATYY | WWRQAPGQGLQWVGWINPKTGQPNNPRQFQGRVSL | DTATITCQANGYLNWY |
| R/ | ADSVKSRFTISRDDSKNSLYLEMNSLRTEDT | TRHASFDFDTFSFYMDLKALRSDDTAVYFCARQRS | QQRRGKAPKLLIYDGS |
| huSP34.39.13scFv | AVYYCVRHGNFGHSYVSWFAYWGQGTLVTVS | DYWDFDVWGSGTQVTVSSASTKGPSVFPLAPSSKS | KLERGVPSRFSGRRWG |
| AAS + W | SGGGGSGGGGSGGGGSGGGGSQAVVTQEPSL | TSGGTAALGCLVKDYFPEPVTVSWNSGALTSGVHT | QEYNLTINNLQPEDIA |
| | TVSPGGTVTLTCGSSTGAVTTGHYANWVQQK | FPAVLQSSGLYSLSSVVTVPSSSLGTQTYICNVNH | TYFCQVYEFVVPGTRL |
| | PGQAPRGLIGGTSNRAPGVPARFSGSLLGGK | KPSNTKVDKKVEPKSCDKTHTCPPCPAPEAAGGPS | DLKRTVAAPSVFIFPP |
| | AALTISGAQPEDEAEYYCALWYSNRWVFGGG | VFLFPPKPKDTLMISRTPEVTCVVVDVSHEDPEVK | SDEQLKSGTASVVCLL |
| | TKLTVLEPKSSDKTHTCPPCPAPEAAGGPSV | FNWYVDGVEVHNAKTKPREEQYNSTYRVVSVLTVL | NNFYPREAKVQWKVDN |
| | FLFPPKPKDTLMISRTPEVICVVVDVSHEDP | HQDWLNGKEYKCKVSNKALPASIEKTISKAKGQPR | ALQSGNSQESVTEQDS |
| | EVKFNWYVDGVEVHNAKTKPREEQYNSTYRV | EPQVYTLPPSREEMTKNQVSLSCAVKGFYPSDIAV | KDSTYSLSSTLTLSKA |
| | VSVLTVLHQDWLNGKEYKCKVSNKALPASIE | EWESNGQPENNYKTTPPVLDSDGSFFLVSKLTVDK | DYEKHKVYACEVTHQG |
| | KTISKAKGQPREPQVYTLPPSREEMTKNQVS | SRWQQGNVFSCSVMHEALHNRYTQKSLSLSPGK | LSSPVTKSFNRGEC |
| | LWCLVKGFYPSDIAVEWESNGQPENNYKTTP | | |
| | PVLDSDGSFFLYSKLTVDKSRWQQGNVFSCS | | |
| | VMHEALHNHYTQKSLSLSPGK | | |
| 225 | SEQ ID NO: 807 | SEQ ID NO: 805 | SEQ ID NO: 802 |
| h3BNC117. | EVQLVESGGGLVQPGGSLRLSCAASGFTFNT | QVQLLQSGAAVTKPGASVRVSCEASGYNIRDYFIH | DIQMTQSPSSLSASVG |
| 52.64 | YAMNWVRQAPGKGLEWVGRIRSKYNNYATYY | WWRQAPGQGLQWVGWINPKTGQPNNPRQFQGRVSL | DTATITCQANGYLNWY |
| AAS + SAV/ | ADSVKSRFTISRDDSKNSLYLEMNSLRTEDT | TRHASFDFDTFSFYMDLKALRSDDTAVYFCARQRS | QQRRGKAPKLLIYDGS |
| huSP34.39.13scFv | AVYYCVRHGNFGHSYVSWFAYWGQGTLVTVS | DYWDFDVWGSGTQVTVSSASTKGPSVFPLAPSSKS | KLERGVPSRFSGRRWG |
| AAS + W | SGGGGSGGGGSGGGGSGGGGSQAVVTQEPSL | TSGGTAALGCLVKDYFPEPVTVSWNSGALTSGVHT | QEYNLTINNLQPEDIA |
| | TVSPGGTVTLTCGSSTGAVTTGHYANWVQQK | FPAVLQSSGLYSLSSVVTVPSSSLGTQTYICNVNH | TYFCQVYEFVVPGTRL |
| | PGQAPRGLIGGTSNRAPGVPARFSGSLLGGK | KPSNTKVDKKVEPKSCDKTHTCPPCPAPEAAGGPS | DLKRTVAAPSVFIFPP |
| | AALTISGAQPEDEAEYYCALWYSNRWVFGGG | VFLFPPKPKDTLMISRTPEVTCVVVDVSHEDPEVK | SDEQLKSGTASVVCLL |
| | TKLTVLEPKSSDKTHTCPPCPAPEAAGGPSV | FNWYVDGVEVHNAKTKPREEQYNSTYRVVSVLTVL | NNFYPREAKVQWKVDN |
| | FLFPPKPKDTLMISRTPEVICVVVDVSHEDP | HQDWLNGKEYKCKVSNKALPASIEKTISKAKGQPR | ALQSGNSQESVTEQDS |
| | EVKFNWYVDGVEVHNAKTKPREEQYNSTYRV | EPQVYTLPPSREEMTKNQVSLSCAVKGFYPSDIAV | KDSTYSLSSTLTLSKA |
| | VSVLTVLHQDWLNGKEYKCKVSNKALPASIE | EWESNGQPENNYKTTPPVLDSDGSFFLVSKLTVDK | DYEKHKVYACEVTHQG |
| | KTISKAKGQPREPQVYTLPPSREEMTKNQVS | SRWQQGNVFSCSVMHEALHNHYTQKSLSLSPGK | LSSPVTKSFNRGEC |
| | LWCLVKGFYPSDIAVEWESNGQPENNYKTTP | | |
| | PVLDSDGSFFLYSKLTVDKSRWQQGNVFSCS | | |
| | VMHEALHNHYTQKSLSLSPGK | | |
| 226 | SEQ ID NO: 808 | SEQ ID NO: 809 | SEQ ID NO: 802 |
| h3BNC117.52.64 | EVQLVESGGGLVQPGGSLRLSCAASGFTFNT | QVQLLQSGAAVTKPGASVRVSCEASGYNIRDYFIH | DIQMTQSPSSLSASVG |
| AAS + W + YTE/ | YAMNWVRQAPGKGLEWVGRIRSKYNNYATYY | WWRQAPGQGLQWVGWINPKTGQPNNPRQFQGRVSL | DTATITCQANGYLNWY |
| huSP34.39.13scFv | ADSVKSRFTISRDDSKNSLYLEMNSLRTEDT | TRHASFDFDTFSFYMDLKALRSDDTAVYFCARQRS | QQRRGKAPKLLIYDGS |
| AAS + SAV + R | AVYYCVRHGNFGHSYVSWFAYWGQGTLVTVS | DYWDFDVWGSGTQVTVSSASTKGPSVFPLAPSSKS | KLERGVPSRFSGRRWG |
| | SGGGGSGGGGSGGGGSGGGGSQAVVTQEPSL | TSGGTAALGCLVKDYFPEPVTVSWNSGALTSGVHT | QEYNLTINNLQPEDIA |
| | TVSPGGTVTLTCGSSTGAVTTGHYANWVQQK | FPAVLQSSGLYSLSSVVTVPSSSLGTQTYICNVNH | TYFCQVYEFVVPGTRL |
| | PGQAPRGLIGGTSNRAPGVPARFSGSLLGGK | KPSNTKVDKKVEPKSCDKTHTCPPCPAPEAAGGPS | DLKRTVAAPSVFIFPP |
| | AALTISGAQPEDEAEYYCALWYSNRWVFGGG | VFLFPPKPKDTLYITREPEVTCVVVDVSHEDPEVK | SDEQLKSGTASVVCLL |
| | TKLTVLEPKSSDKTHTCPPCPAPEAAGGPSV | FNWYVDGVEVHNAKTKPREEQYNSTYRVVSVLTVL | NNFYPREAKVQWKVDN |
| | FLFPPKPKDTLMISRTPEVICVVVDVSHEDP | HQDWLNGKEYKCKVSNKALPASIEKTISKAKGQPR | ALQSGNSQESVTEQDS |
| | EVKFNWYVDGVEVHNAKTKPREEQYNSTYRV | EPQVYTLPPSREEMTKNQVSLWCLVKGFYPSDIAV | KDSTYSLSSTLTLSKA |
| | VSVLTVLHQDWLNGKEYKCKVSNKALPASIE | EWESNGQPENNYKTTPPVLDSDGSFFLYSKLTVDK | DYEKHKVYACEVTHQG |
| | KTISKAKGQPREPQVYTLPPSREEMTKNQVS | SRWQQGNVFSCSVMHEALHNHYTQKSLSLSPGK | LSSPVTKSFNRGEC |
| | LSCAVKGFYPSDIAVEWESNGQPENNYKTTP | | |
| | PVLDSDGSFFLVSKLTVDKSRWQQGNVFSCS | | |
| | VMHEALHNRYTQKSLSLSPGK | | |
| 227 | SEQ ID NO: 808 | SEQ ID NO: 810 | SEQ ID NO: 802 |
| h3BNC117.52.64 | EVQLVESGGGLVQPGGSLRLSCAASGFTFNT | QVQLLQSGAAVTKPGASVRVSCEASGYNIRDYFIH | DIQMTQSPSSLSASVG |
| AAS + W/ | YAMNWVRQAPGKGLEWVGRIRSKYNNYATYY | WWRQAPGQGLQWVGWINPKTGQPNNPRQFQGRVSL | DTATITCQANGYLNWY |
| huSP34.39.13scFv | ADSVKSRFTISRDDSKNSLYLEMNSLRTEDT | TRHASFDFDTFSFYMDLKALRSDDTAVYFCARQRS | QQRRGKAPKLLIYDGS |
| AAs + SAV + | AVYYCVRHGNFGHSYVSWFAYWGQGTLVTVS | DYWDFDVWGSGTQVTVSSASTKGPSVFPLAPSSKS | KLERGVPSRFSGRRWG |
| R | SGGGGSGGGGSGGGGSGGGGSQAVVTQEPSL | TSGGTAALGCLVKDYFPEPVTVSWNSGALTSGVHT | QEYNLTINNLQPEDIA |
| | TVSPGGTVTLTCGSSTGAVTTGHYANWVQQK | FPAVLQSSGLYSLSSVVTVPSSSLGTQTYICNVNH | TYFCQVYEFVVPGTRL |
| | PGQAPRGLIGGTSNRAPGVPARFSGSLLGGK | KPSNTKVDKKVEPKSCDKTHTCPPCPAPEAAGGPS | DLKRTVAAPSVFIFPP |
| | AALTISGAQPEDEAEYYCALWYSNRWVFGGG | VFLFPPKPKDTLMISRTPEVTCVVVDVSHEDPEVK | SDEQLKSGTASVVCLL |
| | TKLTVLEPKSSDKTHTCPPCPAPEAAGGPSV | FNWYVDGVEVHNAKTKPREEQYNSTYRVVSVLTVL | NNFYPREAKVQWKVDN |
| | FLFPPKPKDTLMISRTPEVICVVVDVSHEDP | HQDWLNGKEYKCKVSNKALPASIEKTISKAKGQPR | ALQSGNSQESVTEQDS |
| | EVKFNWYVDGVEVHNAKTKPREEQYNSTYRV | EPQVYTLPPSREEMTKNQVSLWCLVKGFYPSDIAV | KDSTYSLSSTLTLSKA |
| | VSVLTVLHQDWLNGKEYKCKVSNKALPASIE | EWESNGQPENNYKTTPPVLDSDGSFFLYSKLTVDK | DYEKHKVYACEVTHQG |
| | KTISKAKGQPREPQVYTLPPSREEMTKNQVS | SRWQQGNVFSCSVMHEALHNHYTQKSLSLSPGK | LSSPVTKSFNRGEC |
| | LSCAVKGFYPSDIAVEWESNGQPENNYKTTP | | |
| | PVLDSDGSFFLVSKLTVDKSRWQQGNVFSCS | | |
| | VMHEALHNRYTQKSLSLSPGK | | |
| 228 | SEQ ID NO: 811 | SEQ ID NO: 801 | SEQ ID NO: 802 |
| h3BNC117.52.64 | EVQLVESGGGLVQPGGSLRLSCAASGFTFNT | QVQLLQSGAAVTKPGASVRVSCEASGYNIRDYFIH | DIQMTQSPSSLSASVG |
| AAS + SAV + | YAMNWVRQAPGKGLEWVGRIRSKYNNYATYY | WWRQAPGQGLQWVGWINPKTGQPNNPRQFQGRVSL | DTATITCQANGYLNWY |
| YTE/ | AASVKGRFTISRDDSKNSLYLQMNSLKTEDT | TRHASFDFDTFSFYMDLKALRSDDTAVYFCARQRS | QQRRGKAPKLLIYDGS |
| huSP34.1.3scFv | AMYYCVRHGNFGNSYVSWFAYWGQGTLVTVS | DYWDFDVWGSGTQVTVSSASTKGPSVFPLAPSSKS | KLERGVPSRFSGRRWG |
| AAS + W + YTE | SGGGGSGGGGSGGGGSGGGGSQAVVTQEPSL | TSGGTAALGCLVKDYFPEPVTVSWNSGALTSGVHT | QEYNLTINNLQPEDIA |
| | TVSPGGTVTLTCGSSTGAVTTGHYANWVQQK | FPAVLQSSGLYSLSSVVTVPSSSLGTQTYICNVNH | TYFCQVYEFVVPGTRL |
| | PGQAPRGLIGGTNKRAPWTPARFSGSLLGGK | KPSNTKVDKKVEPKSCDKTHTCPPCPAPEAAGGPS | DLKRTVAAPSVFIFPP |
| | AALTLSGAQPEDEAEYYCALWYSNLWVFGGG | VFLFPPKPKDTLYITREPEVTCVVVDVSHEDPEVK | SDEQLKSGTASVVCLL |
| | TKLTVLEPKSSDKTHTCPPCPAPEAAGGPSV | FNWYVDGVEVHNAKTKPREEQYNSTYRVVSVLTVL | NNFYPREAKVQWKVDN |
| | FLFPPKPKDTLYITREPEVTCVVVDVSHEDP | HQDWLNGKEYKCKVSNKALPASIEKTISKAKGQPR | ALQSGNSQESVTEQDS |
| | EVKFNWYVDGVEVHNAKTKPREEQYNSTYRV | EPQVYTLPPSREEMTKNQVSLSCAVKGFYPSDIAV | KDSTYSLSSTLTLSKA |
| | VSVLTVLHQDWLNGKEYKCKVSNKALPASIE | EWESNGQPENNYKTTPPVLDSDGSFFLVSKLTVDK | DYEKHKVYACEVTHQG |
| | KTISKAKGQPREPQVYTLPPSREEMTKNQVS | SRWQQGNVFSCSVMHEALHNHYTQKSLSLSPGK | LSSPVTKSFNRGEC |
| | LWCLVKGFYPSDIAVEWESNGQPENNYKTTP | | |
| | PVLDSDGSFFLYSKLTVDKSRWQQGNVFSCS | | |
| | VMHEALHNHYTQKSLSLSPGK | | |
| 229 | SEQ ID NO: 812 | SEQ ID NO: 809 | SEQ ID NO: 802 |
| h3BNC117.52.64 | EVQLVESGGGLVQPGGSLRLSCAASGFTFNT | QVQLLQSGAAVTKPGASVRVSCEASGYNIRDYFIH | DIQMTQSPSSLSASVG |
| AAS + W + | YAMNWVRQAPGKGLEWVGRIRSKYNNYATYY | WWRQAPGQGLQWVGWINPKTGQPNNPRQFQGRVSL | DTATITCQANGYLNWY |
| YTE/ | AASVKGRFTISRDDSKNSLYLQMNSLKTEDT | TRHASFDFDTFSFYMDLKALRSDDTAVYFCARQRS | QQRRGKAPKLLIYDGS |
| huSP34.1.3scFv | AMYYCVRHGNFGNSYVSWFAYWGQGTLVTVS | DYWDFDVWGSGTQVTVSSASTKGPSVFPLAPSSKS | KLERGVPSRFSGRRWG |
| AAS + SAV + | SGGGGSGGGGSGGGGSGGGGSQAVVTQEPSL | TSGGTAALGCLVKDYFPEPVTVSWNSGALTSGVHT | QEYNLTINNLQPEDIA |
| R | TVSPGGTVTLTCGSSTGAVTTGHYANWVQQK | FPAVLQSSGLYSLSSVVTVPSSSLGTQTYICNVNH | TYFCQVYEFVVPGTRL |
| | PGQAPRGLIGGTNKRAPWTPARFSGSLLGGK | KPSNTKVDKKVEPKSCDKTHTCPPCPAPEAAGGPS | DLKRTVAAPSVFIFPP |
| | AALTLSGAQPEDEAEYYCALWYSNLWVFGGG | VFLFPPKPKDTLYITREPEVTCVVVDVSHEDPEVK | SDEQLKSGTASVVCLL |
| | TKLTVLEPKSSDKTHTCPPCPAPEAAGGPSV | FNWYVDGVEVHNAKTKPREEQYNSTYRVVSVLTVL | NNFYPREAKVQWKVDN |
| | FLFPPKPKDTLMISRTPEVICVVVDVSHEDP | HQDWLNGKEYKCKVSNKALPASIEKTISKAKGQPR | ALQSGNSQESVTEQDS |
| | EVKFNWYVDGVEVHNAKTKPREEQYNSTYRV | EPQVYTLPPSREEMTKNQVSLWCLVKGFYPSDIAV | KDSTYSLSSTLTLSKA |
| | VSVLTVLHQDWLNGKEYKCKVSNKALPASIE | EWESNGQPENNYKTTPPVLDSDGSFFLYSKLTVDK | DYEKHKVYACEVTHQG |
| | KTISKAKGQPREPQVYTLPPSREEMTKNQVS | SRWQQGNVFSCSVMHEALHNHYTQKSLSLSPGK | LSSPVTKSFNRGEC |
| | LSCAVKGFYPSDIAVEWESNGQPENNYKTTP | | |
| | PVLDSDGSFFLVSKLTVDKSRWQQGNVFSCS | | |
| | VMHEALHNRYTQKSLSLSPGK | | |
| 230 | SEQ ID NO: 812 | SEQ ID NO: 810 | SEQ ID NO: 802 |
| h3BNC117.52.64 | EVQLVESGGGLVQPGGSLRLSCAASGFTFNT | QVQLLQSGAAVTKPGASVRVSCEASGYNIRDYFIH | DIQMTQSPSSLSASVG |
| AAS + W/ | YAMNWVRQAPGKGLEWVGRIRSKYNNYATYY | WWRQAPGQGLQWVGWINPKTGQPNNPRQFQGRVSL | DTATITCQANGYLNWY |
| huSP34.1.3scFv | AASVKGRFTISRDDSKNSLYLQMNSLKTEDT | TRHASFDFDTFSFYMDLKALRSDDTAVYFCARQRS | QQRRGKAPKLLIYDGS |
| AAS + SAV + | AMYYCVRHGNFGNSYVSWFAYWGQGTLVTVS | DYWDFDVWGSGTQVTVSSASTKGPSVFPLAPSSKS | KLERGVPSRFSGRRWG |
| R | SGGGGSGGGGSGGGGSGGGGSQAVVTQEPSL | TSGGTAALGCLVKDYFPEPVTVSWNSGALTSGVHT | QEYNLTINNLQPEDIA |
| | TVSPGGTVTLTCGSSTGAVTTGHYANWVQQK | FPAVLQSSGLYSLSSVVTVPSSSLGTQTYICNVNH | TYFCQVYEFVVPGTRL |
| | PGQAPRGLIGGTNKRAPWTPARFSGSLLGGK | KPSNTKVDKKVEPKSCDKTHTCPPCPAPEAAGGPS | DLKRTVAAPSVFIFPP |
| | AALTLSGAQPEDEAEYYCALWYSNLWVFGGG | VFLFPPKPKDTLMISRTPEVTCVVVDVSHEDPEVK | SDEQLKSGTASVVCLL |
| | TKLTVLEPKSSDKTHTCPPCPAPEAAGGPSV | FNWYVDGVEVHNAKTKPREEQYNSTYRVVSVLTVL | NNFYPREAKVQWKVDN |
| | FLFPPKPKDTLMISRTPEVICVVVDVSHEDP | HQDWLNGKEYKCKVSNKALPASIEKTISKAKGQPR | ALQSGNSQESVTEQDS |
| | EVKFNWYVDGVEVHNAKTKPREEQYNSTYRV | EPQVYTLPPSREEMTKNQVSLWCLVKGFYPSDIAV | KDSTYSLSSTLTLSKA |
| | VSVLTVLHQDWLNGKEYKCKVSNKALPASIE | EWESNGQPENNYKTTPPVLDSDGSFFLYSKLTVDK | DYEKHKVYACEVTHQG |
| | KTISKAKGQPREPQVYTLPPSREEMTKNQVS | SRWQQGNVFSCSVMHEALHNHYTQKSLSLSPGK | LSSPVTKSFNRGEC |
| | LSCAVKGFYPSDIAVEWESNGQPENNYKTTP | | |
| | PVLDSDGSFFLVSKLTVDKSRWQQGNVFSCS | | |
| | VMHEALHNRYTQKSLSLSPGK | | |
| 231 | SEQ ID NO: 813 | SEQ ID NO: 805 | SEQ ID NO: 802 |
| h3BNC117.52.64 | EVQLVESGGGLVQPGGSLRLSCAASGFTFNT | QVQLLQSGAAVTKPGASVRVSCEASGYNIRDYFIH | DIQMTQSPSSLSASVG |
| AAS + SAV/ | YAMNWVRQAPGKGLEWVGRIRSKYNNYATYY | WWRQAPGQGLQWVGWINPKTGQPNNPRQFQGRVSL | DTATITCQANGYLNWY |
| huSP34.1.3scFv | AASVKGRFTISRDDSKNSLYLQMNSLKTEDT | TRHASFDFDTFSFYMDLKALRSDDTAVYFCARQRS | QQRRGKAPKLLIYDGS |
| AAS + W | AMYYCVRHGNFGNSYVSWFAYWGQGTLVTVS | DYWDFDVWGSGTQVTVSSASTKGPSVFPLAPSSKS | KLERGVPSRFSGRRWG |
| | SGGGGSGGGGSGGGGSGGGGSQAVVTQEPSL | TSGGTAALGCLVKDYFPEPVTVSWNSGALTSGVHT | QEYNLTINNLQPEDIA |
| | TVSPGGTVTLTCGSSTGAVTTGHYANWVQQK | FPAVLQSSGLYSLSSVVTVPSSSLGTQTYICNVNH | TYFCQVYEFVVPGTRL |
| | PGQAPRGLIGGTNKRAPWTPARFSGSLLGGK | KPSNTKVDKKVEPKSCDKTHTCPPCPAPEAAGGPS | DLKRTVAAPSVFIFPP |
| | AALTLSGAQPEDEAEYYCALWYSNLWVFGGG | VFLFPPKPKDTLMISRTPEVTCVVVDVSHEDPEVK | SDEQLKSGTASVVCLL |
| | TKLTVLEPKSSDKTHTCPPCPAPEAAGGPSV | FNWYVDGVEVHNAKTKPREEQYNSTYRVVSVLTVL | NNFYPREAKVQWKVDN |
| | FLFPPKPKDTLMISRTPEVICVVVDVSHEDP | HQDWLNGKEYKCKVSNKALPASIEKTISKAKGQPR | ALQSGNSQESVTEQDS |
| | EVKFNWYVDGVEVHNAKTKPREEQYNSTYRV | EPQVYTLPPSREEMTKNQVSLSCAVKGFYPSDIAV | KDSTYSLSSTLTLSKA |
| | VSVLTVLHQDWLNGKEYKCKVSNKALPASIE | EWESNGQPENNYKTTPPVLDSDGSFFLVSKLTVDK | DYEKHKVYACEVTHQG |
| | KTISKAKGQPREPQVYTLPPSREEMTKNQVS | SRWQQGNVFSCSVMHEALHNHYTQKSLSLSPGK | LSSPVTKSFNRGEC |
| | LWCLVKGFYPSDIAVEWESNGQPENNYKTTP | | |
| | PVLDSDGSFFLYSKLTVDKSRWQQGNVFSCS | | |
| | VMHEALHNHYTQKSLSLSPGK | | |
| 232 | SEQ ID NO: 812 | SEQ ID NO: 814 | SEQ ID NO: 802 |
| h3BNC117.52.64 | EVQLVESGGGLVQPGGSLRLSCAASGFTFNT | QVQLLQSGAAVTKPGASVRVSCEASGYNIRDYFIH | DIQMTQSPSSLSASVG |
| AAS + W + LS/ | YAMNWVRQAPGKGLEWVGRIRSKYNNYATYY | WWRQAPGQGLQWVGWINPKTGQPNNPRQFQGRVSL | DTATITCQANGYLNWY |
| huSP34.1.3 | AASVKGRFTISRDDSKNSLYLQMNSLKTEDT | TRHASFDFDTFSFYMDLKALRSDDTAVYFCARQRS | QQRRGKAPKLLIYDGS |
| scFv | AMYYCVRHGNFGNSYVSWFAYWGQGTLVTVS | DYWDFDVWGSGTQVTVSSASTKGPSVFPLAPSSKS | KLERGVPSRFSGRRWG |
| AAS + SAV + | SGGGGSGGGGSGGGGSGGGGSQAVVTQEPSL | TSGGTAALGCLVKDYFPEPVTVSWNSGALTSGVHT | QEYNLTINNLQPEDIA |
| R | TVSPGGTVTLTCGSSTGAVTTGHYANWVQQK | FPAVLQSSGLYSLSSVVTVPSSSLGTQTYICNVNH | TYFCQVYEFVVPGTRL |
| | PGQAPRGLIGGTNKRAPWTPARFSGSLLGGK | KPSNTKVDKKVEPKSCDKTHTCPPCPAPEAAGGPS | DLKRTVAAPSVFIFPP |
| | AALTLSGAQPEDEAEYYCALWYSNLWVFGGG | VFLFPPKPKDTLMISRTPEVTCVVVDVSHEDPEVK | SDEQLKSGTASVVCLL |
| | TKLTVLEPKSSDKTHTCPPCPAPEAAGGPSV | FNWYVDGVEVHNAKTKPREEQYNSTYRVVSVLTVL | NNFYPREAKVQWKVDN |
| | FLFPPKPKDTLMISRTPEVICVVVDVSHEDP | HQDWLNGKEYKCKVSNKALPASIEKTISKAKGQPR | ALQSGNSQESVTEQDS |
| | EVKFNWYVDGVEVHNAKTKPREEQYNSTYRV | EPQVYTLPPSREEMTKNQVSLWCLVKGFYPSDIAV | KDSTYSLSSTLTLSKA |
| | VSVLTVLHQDWLNGKEYKCKVSNKALPASIE | EWESNGQPENNYKTTPPVLDSDGSFFLYSKLTVDK | DYEKHKVYACEVTHQG |
| | KTISKAKGQPREPQVYTLPPSREEMTKNQVS | SRWQQGNVFSCSVLHEALHSHYTQKSLSLSPGK | LSSPVTKSFNRGEC |
| | LSCAVKGFYPSDIAVEWESNGQPENNYKTTP | | |
| | PVLDSDGSFFLVSKLTVDKSRWQQGNVFSCS | | |
| | VMHEALHNRYTQKSLSLSPGK | | |
| 233 | SEQ ID NO: 815 | SEQ ID NO: 801 | SEQ ID NO: 802 |
| h3BNC117.52.64 | EVQLVESGGGLVQPGGSLRLSCAASGFTFNT | QVQLLQSGAAVTKPGASVRVSCEASGYNIRDYFIH | DIQMTQSPSSLSASVG |
| AAS + SAV + | YAMNWVRQAPGKGLEWVGRIRSKYNNYATYY | WWRQAPGQGLQWVGWINPKTGQPNNPRQFQGRVSL | DTATITCQANGYLNWY |
| YTE/ | ADSVKGRFTISRDDSKNSLYLQMNSLRTEDT | TRHASFDFDTFSFYMDLKALRSDDTAVYFCARQRS | QQRRGKAPKLLIYDGS |
| huSP34.3.8scFv | AVYYCVRHGNFGHSYVSWFAYWGQGTLVTVS | DYWDFDVWGSGTQVTVSSASTKGPSVFPLAPSSKS | KLERGVPSRFSGRRWG |
| AAS + W + YTE | SGGGGSGGGGSGGGGSGGGGSQAVVTQEPSL | TSGGTAALGCLVKDYFPEPVTVSWNSGALTSGVHT | QEYNLTINNLQPEDIA |
| | TVSPGGTVTLTCGSSTGAVTTGHYANWVQQK | FPAVLQSSGLYSLSSVVTVPSSSLGTQTYICNVNH | TYFCQVYEFVVPGTRL |
| | PGQAPRGLIGGTNKRAPGVPARFSGSLLGGK | KPSNTKVDKKVEPKSCDKTHTCPPCPAPEAAGGPS | DLKRTVAAPSVFIFPP |
| | AALTISGAQPEDEAEYYCALWYSNRWVFGGG | VFLFPPKPKDTLYITREPEVTCVVVDVSHEDPEVK | SDEQLKSGTASVVCLL |
| | TKLTVLEPKSSDKTHTCPPCPAPEAAGGPSV | FNWYVDGVEVHNAKTKPREEQYNSTYRVVSVLTVL | NNFYPREAKVQWKVDN |
| | FLFPPKPKDTLYITREPEVTCVVVDVSHEDP | HQDWLNGKEYKCKVSNKALPASIEKTISKAKGQPR | ALQSGNSQESVTEQDS |
| | EVKFNWYVDGVEVHNAKTKPREEQYNSTYRV | EPQVYTLPPSREEMTKNQVSLSCAVKGFYPSDIAV | KDSTYSLSSTLTLSKA |
| | VSVLTVLHQDWLNGKEYKCKVSNKALPASIE | EWESNGQPENNYKTTPPVLDSDGSFFLVSKLTVDK | DYEKHKVYACEVTHQG |
| | KTISKAKGQPREPQVYTLPPSREEMTKNQVS | SRWQQGNVFSCSVMHEALHNHYTQKSLSLSPGK | LSSPVTKSFNRGEC |
| | LWCLVKGFYPSDIAVEWESNGQPENNYKTTP | | |
| | PVLDSDGSFFLYSKLTVDKSRWQQGNVFSCS | | |
| | VMHEALHNHYTQKSLSLSPGK | | |
| 234 | SEQ ID NO: 816 | SEQ ID NO: 805 | SEQ ID NO: 802 |
| h3BNC117.52.64 | EVQLVESGGGLVQPGGSLRLSCAASGFTFNT | QVQLLQSGAAVTKPGASVRVSCEASGYNIRDYFIH | DIQMTQSPSSLSASVG |
| AAS + SAV/ | YAMNWVRQAPGKGLEWVGRIRSKYNNYATYY | WWRQAPGQGLQWVGWINPKTGQPNNPRQFQGRVSL | DTATITCQANGYLNWY |
| huSP34.3.8scFv | ADSVKGRFTISRDDSKNSLYLQMNSLRTEDT | TRHASFDFDTFSFYMDLKALRSDDTAVYFCARQRS | QQRRGKAPKLLIYDGS |
| AAS + W | AVYYCVRHGNFGHSYVSWFAYWGQGTLVTVS | DYWDFDVWGSGTQVTVSSASTKGPSVFPLAPSSKS | KLERGVPSRFSGRRWG |
| | SGGGGSGGGGSGGGGSGGGGSQAVVTQEPSL | TSGGTAALGCLVKDYFPEPVTVSWNSGALTSGVHT | QEYNLTINNLQPEDIA |
| | TVSPGGTVTLTCGSSTGAVTTGHYANWVQQK | FPAVLQSSGLYSLSSVVTVPSSSLGTQTYICNVNH | TYFCQVYEFVVPGTRL |
| | PGQAPRGLIGGTNKRAPGVPARFSGSLLGGK | KPSNTKVDKKVEPKSCDKTHTCPPCPAPEAAGGPS | DLKRTVAAPSVFIFPP |
| | AALTISGAQPEDEAEYYCALWYSNRWVFGGG | VFLFPPKPKDTLMISRTPEVTCVVVDVSHEDPEVK | SDEQLKSGTASVVCLL |
| | TKLTVLEPKSSDKTHTCPPCPAPEAAGGPSV | FNWYVDGVEVHNAKTKPREEQYNSTYRVVSVLTVL | NNFYPREAKVQWKVDN |
| | FLFPPKPKDTLMISRTPEVICVVVDVSHEDP | HQDWLNGKEYKCKVSNKALPASIEKTISKAKGQPR | ALQSGNSQESVTEQDS |
| | EVKFNWYVDGVEVHNAKTKPREEQYNSTYRV | EPQVYTLPPSREEMTKNQVSLSCAVKGFYPSDIAV | KDSTYSLSSTLTLSKA |
| | VSVLTVLHQDWLNGKEYKCKVSNKALPASIE | EWESNGQPENNYKTTPPVLDSDGSFFLVSKLTVDK | DYEKHKVYACEVTHQG |
| | KTISKAKGQPREPQVYTLPPSREEMTKNQVS | SRWQQGNVFSCSVMHEALHNHYTQKSLSLSPGK | LSSPVTKSFNRGEC |
| | LWCLVKGFYPSDIAVEWESNGQPENNYKTTP | | |
| | PVLDSDGSFFLYSKLTVDKSRWQQGNVFSCS | | |
| | VMHEALHNHYTQKSLSLSPGK | | |
| 235 | SEQ ID NO: 817 | SEQ ID NO: 801 | SEQ ID NO: 802 |
| h3BNC117.52.64 | EVQLVESGGGLVQPGGSLRLSCAASGFTFNT | QVQLLQSGAAVTKPGASVRVSCEASGYNIRDYFIH | DIQMTQSPSSLSASVG |
| AAS + SAV + | YAMNWVRQAPGKGLEWVGRIRSKYNNYATYY | WWRQAPGQGLQWVGWINPKTGQPNNPRQFQGRVSL | DTATITCQANGYLNWY |
| YTE/ | AASVKGRFTISRDDSKNSLYLQMNSLKTEDT | TRHASFDFDTFSFYMDLKALRSDDTAVYFCARQRS | QQRRGKAPKLLIYDGS |
| huSP34.34.3scFv | AMYYCVRHGNFGHSYVSWFAYWGQGTLVTVS | DYWDFDVWGSGTQVTVSSASTKGPSVFPLAPSSKS | KLERGVPSRFSGRRWG |
| AAS + W + YTE | SGGGGSGGGGSGGGGSGGGGSQAVVTQEPSL | TSGGTAALGCLVKDYFPEPVTVSWNSGALTSGVHT | QEYNLTINNLQPEDIA |
| | TVSPGGTVTLTCGSSTGAVTTGHYANWVQQK | FPAVLQSSGLYSLSSVVTVPSSSLGTQTYICNVNH | TYFCQVYEFVVPGTRL |
| | PGQAPRGLIGGTNKRAPWTPARFSGSLLGGK | KPSNTKVDKKVEPKSCDKTHTCPPCPAPEAAGGPS | DLKRTVAAPSVFIFPP |
| | AALTLSGAQPEDEAEYYCALWYSNLWVFGGG | VFLFPPKPKDTLYITREPEVTCVVVDVSHEDPEVK | SDEQLKSGTASVVCLL |
| | TKLTVLEPKSSDKTHTCPPCPAPEAAGGPSV | FNWYVDGVEVHNAKTKPREEQYNSTYRVVSVLTVL | NNFYPREAKVQWKVDN |
| | FLFPPKPKDTLYITREPEVTCVVVDVSHEDP | HQDWLNGKEYKCKVSNKALPASIEKTISKAKGQPR | ALQSGNSQESVTEQDS |
| | EVKFNWYVDGVEVHNAKTKPREEQYNSTYRV | EPQVYTLPPSREEMTKNQVSLSCAVKGFYPSDIAV | KDSTYSLSSTLTLSKA |
| | VSVLTVLHQDWLNGKEYKCKVSNKALPASIE | EWESNGQPENNYKTTPPVLDSDGSFFLVSKLTVDK | DYEKHKVYACEVTHQG |
| | KTISKAKGQPREPQVYTLPPSREEMTKNQVS | SRWQQGNVFSCSVMHEALHNHYTQKSLSLSPGK | LSSPVTKSFNRGEC |
| | LWCLVKGFYPSDIAVEWESNGQPENNYKTTP | | |
| | PVLDSDGSFFLYSKLTVDKSRWQQGNVFSCS | | |
| | VMHEALHNHYTQKSLSLSPGK | | |
| 236 | SEQ ID NO: 818 | SEQ ID NO: 805 | SEQ ID NO: 802 |
| h3BNC117.52.64 | EVQLVESGGGLVQPGGSLRLSCAASGFTFNT | QVQLLQSGAAVTKPGASVRVSCEASGYNIRDYFIH | DIQMTQSPSSLSASVG |
| AAS + SAV/ | YAMNWVRQAPGKGLEWVGRIRSKYNNYATYY | WWRQAPGQGLQWVGWINPKTGQPNNPRQFQGRVSL | DTATITCQANGYLNWY |
| huSP34.34.3scFv | AASVKGRFTISRDDSKNSLYLQMNSLKTEDT | TRHASFDFDTFSFYMDLKALRSDDTAVYFCARQRS | QQRRGKAPKLLIYDGS |
| AAS + W | AMYYCVRHGNFGHSYVSWFAYWGQGTLVTVS | DYWDFDVWGSGTQVTVSSASTKGPSVFPLAPSSKS | KLERGVPSRFSGRRWG |
| | SGGGGSGGGGSGGGGSGGGGSQAVVTQEPSL | TSGGTAALGCLVKDYFPEPVTVSWNSGALTSGVHT | QEYNLTINNLQPEDIA |
| | TVSPGGTVTLTCGSSTGAVTTGHYANWVQQK | FPAVLQSSGLYSLSSVVTVPSSSLGTQTYICNVNH | TYFCQVYEFVVPGTRL |
| | PGQAPRGLIGGTNKRAPWTPARFSGSLLGGK | KPSNTKVDKKVEPKSCDKTHTCPPCPAPEAAGGPS | DLKRTVAAPSVFIFPP |
| | AALTLSGAQPEDEAEYYCALWYSNLWVFGGG | VFLFPPKPKDTLMISRTPEVTCVVVDVSHEDPEVK | SDEQLKSGTASVVCLL |
| | TKLTVLEPKSSDKTHTCPPCPAPEAAGGPSV | FNWYVDGVEVHNAKTKPREEQYNSTYRVVSVLTVL | NNFYPREAKVQWKVDN |
| | FLFPPKPKDTLMISRTPEVICVVVDVSHEDP | HQDWLNGKEYKCKVSNKALPASIEKTISKAKGQPR | ALQSGNSQESVTEQDS |
| | EVKFNWYVDGVEVHNAKTKPREEQYNSTYRV | EPQVYTLPPSREEMTKNQVSLSCAVKGFYPSDIAV | KDSTYSLSSTLTLSKA |
| | VSVLTVLHQDWLNGKEYKCKVSNKALPASIE | EWESNGQPENNYKTTPPVLDSDGSFFLVSKLTVDK | DYEKHKVYACEVTHQG |
| | KTISKAKGQPREPQVYTLPPSREEMTKNQVS | SRWQQGNVFSCSVMHEALHNHYTQKSLSLSPGK | LSSPVTKSFNRGEC |
| | LWCLVKGFYPSDIAVEWESNGQPENNYKTTP | | |
| | PVLDSDGSFFLYSKLTVDKSRWQQGNVFSCS | | |
| | VMHEALHNHYTQKSLSLSPGK | | |
| 239 | SEQ ID NO: 821 | SEQ ID NO: 822 | SEQ ID NO: 823 |
| hPGT121.66 | EVQLVESGGGLVQPGGSLRLSCAASGFTFNT | QMQLQESGPGLVKPSETLSLTCSVSGASISDSYWS | SDISVAPGETARISCG |
| AAS + SAV + | YAMNWVRQAPGKGLEWVGRIRSKYNNYATYY | WIRRSPGKGLEWIGYVHKSGDTNYNPSLKSRVHLS | EKSLGSRAVQWYQHRA |
| YTE/ | ADSVKGRFTISRDDSKNSLYLQMNSLRTEDT | LDTSKNQVSLSLTGVTAADSGKYYCARTLHGRRIY | GQAPSLIIYNNQDRPS |
| huSP34.3.13scFv | AVYYCVRHGNFGHSYVSWFAYWGQGTLVTVS | GIVAFNEWFTYFYMDVWGTGTQVTVSSASTKGPSV | GIPERFSGSPDFRPGT |
| AAS + W + YTE | SGGGGSGGGGSGGGGSGGGGSQAVVTQEPSL | FPLAPSSKSTSGGTAALGCLVKDYFPEPVTVSWNS | TATLTITSVEAGDEAD |
| | TVSPGGTVTLTCGSSTGAVTTGHYANWVQQK | GALTSGVHTFPAVLQSSGLYSLSSVVTVPSSSLGT | YYCHIWDSRVPTKWVF |
| | PGQAPRGLIGGTSNRAPGVPARFSGSLLGGK | QTYICNVNHKPSNTKVDKKVEPKSCDKTHTCPPCP | GGGTTLTVLGQPKAAP |
| | AALTISGAQPEDEAEYYCALWYSNRWVFGGG | APEAAGGPSVFLFPPKPKDTLYITREPEVTCVVVD | SVTLFPPSSEELQANK |
| | TKLTVLEPKSSDKTHTCPPCPAPEAAGGPSV | VSHEDPEVKFNWYVDGVEVHNAKTKPREEQYNSTY | ATLVCLISDFYPGAVT |
| | FLFPPKPKDTLYITREPEVTCVVVDVSHEDP | RVVSVLTVLHQDWLNGKEYKCKVSNKALPASIEKT | VAWKADSSPVKAGVET |
| | EVKFNWYVDGVEVHNAKTKPREEQYNSTYRV | ISKAKGQPREPQVYTLPPSREEMTKNQVSLSCAVK | TTPSKQSNNKYAASSY |
| | VSVLTVLHQDWLNGKEYKCKVSNKALPASIE | GFYPSDIAVEWESNGQPENNYKTTPPVLDSDGSFF | LSLTPEQWKSHRSYSC |
| | KTISKAKGQPREPQVYTLPPSREEMTKNQVS | LVSKLTVDKSRWQQGNVFSCSVMHEALHNHYTQKS | QVTHEGSTVEKTVAPT |
| | LWCLVKGFYPSDIAVEWESNGQPENNYKTTP | LSLSPGK | ECS |
| | PVLDSDGSFFLYSKLTVDKSRWQQGNVFSCS | | |
| | VMHEALHNHYTQKSLSLSPGK | | |
| 240 | SEQ ID NO: 824 | SEQ ID NO: 825 | SEQ ID NO: 823 |
| hPGT121.66 | EVQLVESGGGLVQPGGSLRLSCAASGFTFNT | QMQLQESGPGLVKPSETLSLTCSVSGASISDSYWS | SDISVAPGETARISCG |
| AAS + SAV + | YAMNWVRQAPGKGLEWVGRIRSKYNNYATYY | WIRRSPGKGLEWIGYVHKSGDTNYNPSLKSRVHLS | EKSLGSRAVQWYQHRA |
| R/ | ADSVKGRFTISRDDSKNSLYLQMNSLRTEDT | LDTSKNQVSLSLTGVTAADSGKYYCARTLHGRRIY | GQAPSLIIYNNQDRPS |
| huSP34.3.13scFv | AVYYCVRHGNFGHSYVSWFAYWGQGTLVTVS | GIVAFNEWFTYFYMDVWGTGTQVTVSSASTKGPSV | GIPERFSGSPDFRPGT |
| AAS + W + YTE | SGGGGSGGGGSGGGGSGGGGSQAVVTQEPSL | FPLAPSSKSTSGGTAALGCLVKDYFPEPVTVSWNS | TATLTITSVEAGDEAD |
| | TVSPGGTVTLTCGSSTGAVTTGHYANWVQQK | GALTSGVHTFPAVLQSSGLYSLSSVVTVPSSSLGT | YYCHIWDSRVPTKWVF |
| | PGQAPRGLIGGTSNRAPGVPARFSGSLLGGK | QTYICNVNHKPSNTKVDKKVEPKSCDKTHTCPPCP | GGGTTLTVLGQPKAAP |
| | AALTISGAQPEDEAEYYCALWYSNRWVFGGG | APEAAGGPSVFLFPPKPKDTLMISRTPEVTCVVVD | SVTLFPPSSEELQANK |
| | TKLTVLEPKSSDKTHTCPPCPAPEAAGGPSV | VSHEDPEVKFNWYVDGVEVHNAKTKPREEQYNSTY | ATLVCLISDFYPGAVT |
| | FLFPPKPKDTLYITREPEVTCVVVDVSHEDP | RVVSVLTVLHQDWLNGKEYKCKVSNKALPASIEKT | VAWKADSSPVKAGVET |
| | EVKFNWYVDGVEVHNAKTKPREEQYNSTYRV | ISKAKGQPREPQVYTLPPSREEMTKNQVSLSCAVK | TTPSKQSNNKYAASSY |
| | VSVLTVLHQDWLNGKEYKCKVSNKALPASIE | GFYPSDIAVEWESNGQPENNYKTTPPVLDSDGSFF | LSLTPEQWKSHRSYSC |
| | KTISKAKGQPREPQVYTLPPSREEMTKNQVS | LVSKLTVDKSRWQQGNVFSCSVMHEALHNRYTQKS | QVTHEGSTVEKTVAPT |
| | LWCLVKGFYPSDIAVEWESNGQPENNYKTTP | LSLSPGK | ECS |
| | PVLDSDGSFFLYSKLTVDKSRWQQGNVFSCS | | |
| | VMHEALHNHYTQKSLSLSPGK | | |
| 241 | SEQ ID NO: 826 | SEQ ID NO: 825 | SEQ ID NO: 823 |
| hPGT121.66 | EVQLVESGGGLVQPGGSLRLSCAASGFTFNT | QMQLQESGPGLVKPSETLSLTCSVSGASISDSYWS | SDISVAPGETARISCG |
| AAS + SAV + | YAMNWVRQAPGKGLEWVGRIRSKYNNYATYY | WIRRSPGKGLEWIGYVHKSGDTNYNPSLKSRVHLS | EKSLGSRAVQWYQHRA |
| R/ | ADSVKGRFTISRDDSKNSLYLQMNSLRTEDT | LDTSKNQVSLSLTGVTAADSGKYYCARTLHGRRIY | GQAPSLIIYNNQDRPS |
| huSP34.3.13scFv | AVYYCVRHGNFGHSYVSWFAYWGQGTLVTVS | GIVAFNEWFTYFYMDVWGTGTQVTVSSASTKGPSV | GIPERFSGSPDFRPGT |
| AAS + W | SGGGGSGGGGSGGGGSGGGGSQAVVTQEPSL | FPLAPSSKSTSGGTAALGCLVKDYFPEPVTVSWNS | TATLTITSVEAGDEAD |
| | TVSPGGTVTLTCGSSTGAVTTGHYANWVQQK | GALTSGVHTFPAVLQSSGLYSLSSVVTVPSSSLGT | YYCHIWDSRVPTKWVF |
| | PGQAPRGLIGGTSNRAPGVPARFSGSLLGGK | QTYICNVNHKPSNTKVDKKVEPKSCDKTHTCPPCP | GGGTTLTVLGQPKAAP |
| | AALTISGAQPEDEAEYYCALWYSNRWVFGGG | APEAAGGPSVFLFPPKPKDTLMISRTPEVTCVVVD | SVTLFPPSSEELQANK |
| | TKLTVLEPKSSDKTHTCPPCPAPEAAGGPSV | VSHEDPEVKFNWYVDGVEVHNAKTKPREEQYNSTY | ATLVCLISDFYPGAVT |
| | FLFPPKPKDTLMISRTPEVICVVVDVSHEDP | RVVSVLTVLHQDWLNGKEYKCKVSNKALPASIEKT | VAWKADSSPVKAGVET |
| | EVKFNWYVDGVEVHNAKTKPREEQYNSTYRV | ISKAKGQPREPQVYTLPPSREEMTKNQVSLSCAVK | TTPSKQSNNKYAASSY |
| | VSVLTVLHQDWLNGKEYKCKVSNKALPASIE | GFYPSDIAVEWESNGQPENNYKTTPPVLDSDGSFF | LSLTPEQWKSHRSYSC |
| | KTISKAKGQPREPQVYTLPPSREEMTKNQVS | LVSKLTVDKSRWQQGNVFSCSVMHEALHNRYTQKS | QVTHEGSTVEKTVAPT |
| | LWCLVKGFYPSDIAVEWESNGQPENNYKTTP | LSLSPGK | ECS |
| | PVLDSDGSFFLYSKLTVDKSRWQQGNVFSCS | | |
| | VMHEALHNHYTQKSLSLSPGK | | |
| 242 | SEQ ID NO: 826 | SEQ ID NO: 827 | SEQ ID NO: 823 |
| hPGT121.66 | EVQLVESGGGLVQPGGSLRLSCAASGFTFNT | QMQLQESGPGLVKPSETLSLTCSVSGASISDSYWS | SDISVAPGETARISCG |
| AAS + SAV/ | YAMNWVRQAPGKGLEWVGRIRSKYNNYATYY | WIRRSPGKGLEWIGYVHKSGDTNYNPSLKSRVHLS | EKSLGSRAVQWYQHRA |
| huSP34.3.13scFv | ADSVKGRFTISRDDSKNSLYLQMNSLRTEDT | LDTSKNQVSLSLTGVTAADSGKYYCARTLHGRRIY | GQAPSLIIYNNQDRPS |
| AAS + W | AVYYCVRHGNFGHSYVSWFAYWGQGTLVTVS | GIVAFNEWFTYFYMDVWGTGTQVTVSSASTKGPSV | GIPERFSGSPDFRPGT |
| | SGGGGSGGGGSGGGGSGGGGSQAVVTQEPSL | FPLAPSSKSTSGGTAALGCLVKDYFPEPVTVSWNS | TATLTITSVEAGDEAD |
| | TVSPGGTVTLTCGSSTGAVTTGHYANWVQQK | GALTSGVHTFPAVLQSSGLYSLSSVVTVPSSSLGT | YYCHIWDSRVPTKWVF |
| | PGQAPRGLIGGTSNRAPGVPARFSGSLLGGK | QTYICNVNHKPSNTKVDKKVEPKSCDKTHTCPPCP | GGGTTLTVLGQPKAAP |
| | AALTISGAQPEDEAEYYCALWYSNRWVFGGG | APEAAGGPSVFLFPPKPKDTLMISRTPEVTCVVVD | SVTLFPPSSEELQANK |
| | TKLTVLEPKSSDKTHTCPPCPAPEAAGGPSV | VSHEDPEVKFNWYVDGVEVHNAKTKPREEQYNSTY | ATLVCLISDFYPGAVT |
| | FLFPPKPKDTLMISRTPEVICVVVDVSHEDP | RVVSVLTVLHQDWLNGKEYKCKVSNKALPASIEKT | VAWKADSSPVKAGVET |
| | EVKFNWYVDGVEVHNAKTKPREEQYNSTYRV | ISKAKGQPREPQVYTLPPSREEMTKNQVSLSCAVK | TTPSKQSNNKYAASSY |
| | VSVLTVLHQDWLNGKEYKCKVSNKALPASIE | GFYPSDIAVEWESNGQPENNYKTTPPVLDSDGSFF | LSLTPEQWKSHRSYSC |
| | KTISKAKGQPREPQVYTLPPSREEMTKNQVS | LVSKLTVDKSRWQQGNVFSCSVMHEALHNHYTQKS | QVTHEGSTVEKTVAPT |
| | LWCLVKGFYPSDIAVEWESNGQPENNYKTTP | LSLSPGK | ECS |
| | PVLDSDGSFFLYSKLTVDKSRWQQGNVFSCS | | |
| | VMHEALHNHYTQKSLSLSPGK | | |
| 243 | SEQ ID NO: 828 | SEQ ID NO: 829 | SEQ ID NO: 823 |
| hPGT121.66 | EVQLVESGGGLVQPGGSLRLSCAASGFTFNT | QMQLQESGPGLVKPSETLSLTCSVSGASISDSYWS | SDISVAPGETARISCG |
| AAS + W/ | YAMNWVRQAPGKGLEWVGRIRSKYNNYATYY | WIRRSPGKGLEWIGYVHKSGDTNYNPSLKSRVHLS | EKSLGSRAVQWYQHRA |
| huSP34.3.13 | ADSVKGRFTISRDDSKNSLYLQMNSLRTEDT | LDTSKNQVSLSLTGVTAADSGKYYCARTLHGRRIY | GQAPSLIIYNNQDRPS |
| scFv | AVYYCVRHGNFGHSYVSWFAYWGQGTLVTVS | GIVAFNEWFTYFYMDVWGTGTQVTVSSASTKGPSV | GIPERFSGSPDFRPGT |
| AAs + sAv + | SGGGGSGGGGSGGGGSGGGGSQAVVTQEPSL | FPLAPSSKSTSGGTAALGCLVKDYFPEPVTVSWNS | TATLTITSVEAGDEAD |
| | TVSPGGTVTLTCGSSTGAVTTGHYANWVQQK | GALTSGVHTFPAVLQSSGLYSLSSVVTVPSSSLGT | YYCHIWDSRVPTKWVF |
| | PGQAPRGLIGGTSNRAPGVPARFSGSLLGGK | QTYICNVNHKPSNTKVDKKVEPKSCDKTHTCPPCP | GGGTTLTVLGQPKAAP |
| | AALTISGAQPEDEAEYYCALWYSNRWVFGGG | APEAAGGPSVFLFPPKPKDTLMISRTPEVTCVVVD | SVTLFPPSSEELQANK |
| | TKLTVLEPKSSDKTHTCPPCPAPEAAGGPSV | VSHEDPEVKFNWYVDGVEVHNAKTKPREEQYNSTY | ATLVCLISDFYPGAVT |
| | FLFPPKPKDTLMISRTPEVICVVVDVSHEDP | RVVSVLTVLHQDWLNGKEYKCKVSNKALPASIEKT | VAWKADSSPVKAGVET |
| | EVKFNWYVDGVEVHNAKTKPREEQYNSTYRV | ISKAKGQPREPQVYTLPPSREEMTKNQVSLWCLVK | TTPSKQSNNKYAASSY |
| | VSVLTVLHQDWLNGKEYKCKVSNKALPASIE | GFYPSDIAVEWESNGQPENNYKTTPPVLDSDGSFF | LSLTPEQWKSHRSYSC |
| | KTISKAKGQPREPQVYTLPPSREEMTKNQVS | LYSKLTVDKSRWQQGNVFSCSVMHEALHNHYTQKS | QVTHEGSTVEKTVAPT |
| | LSCAVKGFYPSDIAVEWESNGQPENNYKTTP | LSLSPGK | ECS |
| | PVLDSDGSFFLVSKLTVDKSRWQQGNVFSCS | | |
| | VMHEALHNRYTQKSLSLSPGK | | |
| 244 | SEQ ID NO: 830 | SEQ ID NO: 822 | SEQ ID NO: 823 |
| hPGT121.66 | EVQLVESGGGLVQPGGSLRLSCAASGFTFNT | QMQLQESGPGLVKPSETLSLTCSVSGASISDSYWS | SDISVAPGETARISCG |
| AAS + SAV + | YAMNWVRQAPGKGLEWVGRIRSKYNNYATYY | WIRRSPGKGLEWIGYVHKSGDTNYNPSLKSRVHLS | EKSLGSRAVQWYQHRA |
| YTE/huSP | ADSVKSRFTISRDDSKNSLYLEMNSLRTEDT | LDTSKNQVSLSLTGVTAADSGKYYCARTLHGRRIY | GQAPSLIIYNNQDRPS |
| 34.39.13 | AVYYCVRHGNFGHSYVSWFAYWGQGTLVTVS | GIVAFNEWFTYFYMDVWGTGTQVTVSSASTKGPSV | GIPERFSGSPDFRPGT |
| scFv | SGGGGSGGGGSGGGGSGGGGSQAVVTQEPSL | FPLAPSSKSTSGGTAALGCLVKDYFPEPVTVSWNS | TATLTITSVEAGDEAD |
| AAS + W + YTE | TVSPGGTVTLTCGSSTGAVTTGHYANWVQQK | GALTSGVHTFPAVLQSSGLYSLSSVVTVPSSSLGT | YYCHIWDSRVPTKWVF |
| | PGQAPRGLIGGTSNRAPGVPARFSGSLLGGK | QTYICNVNHKPSNTKVDKKVEPKSCDKTHTCPPCP | GGGTTLTVLGQPKAAP |
| | AALTISGAQPEDEAEYYCALWYSNRWVFGGG | APEAAGGPSVFLFPPKPKDTLYITREPEVTCVVVD | SVTLFPPSSEELQANK |
| | TKLTVLEPKSSDKTHTCPPCPAPEAAGGPSV | VSHEDPEVKFNWYVDGVEVHNAKTKPREEQYNSTY | ATLVCLISDFYPGAVT |
| | FLFPPKPKDTLYITREPEVTCVVVDVSHEDP | RVVSVLTVLHQDWLNGKEYKCKVSNKALPASIEKT | VAWKADSSPVKAGVET |
| | EVKFNWYVDGVEVHNAKTKPREEQYNSTYRV | ISKAKGQPREPQVYTLPPSREEMTKNQVSLSCAVK | TTPSKQSNNKYAASSY |
| | VSVLTVLHQDWLNGKEYKCKVSNKALPASIE | GFYPSDIAVEWESNGQPENNYKTTPPVLDSDGSFF | LSLTPEQWKSHRSYSC |
| | KTISKAKGQPREPQVYTLPPSREEMTKNQVS | LVSKLTVDKSRWQQGNVFSCSVMHEALHNHYTQKS | QVTHEGSTVEKTVAPT |
| | LWCLVKGFYPSDIAVEWESNGQPENNYKTTP | LSLSPGK | ECS |
| | PVLDSDGSFFLYSKLTVDKSRWQQGNVFSCS | | |
| | VMHEALHNHYTQKSLSLSPGK | | |
| 245 | SEQ ID NO: 830 | SEQ ID NO: 825 | SEQ ID NO: 823 |
| hPGT121.66 | EVQLVESGGGLVQPGGSLRLSCAASGFTFNT | QMQLQESGPGLVKPSETLSLTCSVSGASISDSYWS | SDISVAPGETARISCG |
| AAS + SAV + | YAMNWVRQAPGKGLEWVGRIRSKYNNYATYY | WIRRSPGKGLEWIGYVHKSGDTNYNPSLKSRVHLS | EKSLGSRAVQWYQHRA |
| R/ | ADSVKSRFTISRDDSKNSLYLEMNSLRTEDT | LDTSKNQVSLSLTGVTAADSGKYYCARTLHGRRIY | GQAPSLIIYNNQDRPS |
| huSP34.39.13scFv | AVYYCVRHGNFGHSYVSWFAYWGQGTLVTVS | GIVAFNEWFTYFYMDVWGTGTQVTVSSASTKGPSV | GIPERFSGSPDFRPGT |
| AAS + W + YTE | SGGGGSGGGGSGGGGSGGGGSQAVVTQEPSL | FPLAPSSKSTSGGTAALGCLVKDYFPEPVTVSWNS | TATLTITSVEAGDEAD |
| | TVSPGGTVTLTCGSSTGAVTTGHYANWVQQK | GALTSGVHTFPAVLQSSGLYSLSSVVTVPSSSLGT | YYCHIWDSRVPTKWVF |
| | PGQAPRGLIGGTSNRAPGVPARFSGSLLGGK | QTYICNVNHKPSNTKVDKKVEPKSCDKTHTCPPCP | GGGTTLTVLGQPKAAP |
| | AALTISGAQPEDEAEYYCALWYSNRWVFGGG | APEAAGGPSVFLFPPKPKDTLMISRTPEVTCVVVD | SVTLFPPSSEELQANK |
| | TKLTVLEPKSSDKTHTCPPCPAPEAAGGPSV | VSHEDPEVKFNWYVDGVEVHNAKTKPREEQYNSTY | ATLVCLISDFYPGAVT |
| | FLFPPKPKDTLYITREPEVTCVVVDVSHEDP | RVVSVLTVLHQDWLNGKEYKCKVSNKALPASIEKT | VAWKADSSPVKAGVET |
| | EVKFNWYVDGVEVHNAKTKPREEQYNSTYRV | ISKAKGQPREPQVYTLPPSREEMTKNQVSLSCAVK | TTPSKQSNNKYAASSY |
| | VSVLTVLHQDWLNGKEYKCKVSNKALPASIE | GFYPSDIAVEWESNGQPENNYKTTPPVLDSDGSFF | LSLTPEQWKSHRSYSC |
| | KTISKAKGQPREPQVYTLPPSREEMTKNQVS | LVSKLTVDKSRWQQGNVFSCSVMHEALHNRYTQKS | QVTHEGSTVEKTVAPT |
| | LWCLVKGFYPSDIAVEWESNGQPENNYKTTP | LSLSPGK | ECS |
| | PVLDSDGSFFLYSKLTVDKSRWQQGNVFSCS | | |
| | VMHEALHNHYTQKSLSLSPGK | | |
| 246 | SEQ ID NO: 831 | SEQ ID NO: 825 | SEQ ID NO: 823 |
| hPGT121.66 | EVQLVESGGGLVQPGGSLRLSCAASGFTFNT | QMQLQESGPGLVKPSETLSLTCSVSGASISDSYWS | SDISVAPGETARISCG |
| AAS + SAV + | YAMNWVRQAPGKGLEWVGRIRSKYNNYATYY | WIRRSPGKGLEWIGYVHKSGDTNYNPSLKSRVHLS | EKSLGSRAVQWYQHRA |
| R/ | ADSVKSRFTISRDDSKNSLYLEMNSLRTEDT | LDTSKNQVSLSLTGVTAADSGKYYCARTLHGRRIY | GQAPSLIIYNNQDRPS |
| huSP34.39.13scFv | AVYYCVRHGNFGHSYVSWFAYWGQGTLVTVS | GIVAFNEWFTYFYMDVWGTGTQVTVSSASTKGPSV | GIPERFSGSPDFRPGT |
| AAS + W | SGGGGSGGGGSGGGGSGGGGSQAVVTQEPSL | FPLAPSSKSTSGGTAALGCLVKDYFPEPVTVSWNS | TATLTITSVEAGDEAD |
| | TVSPGGTVTLTCGSSTGAVTTGHYANWVQQK | GALTSGVHTFPAVLQSSGLYSLSSVVTVPSSSLGT | YYCHIWDSRVPTKWVF |
| | PGQAPRGLIGGTSNRAPGVPARFSGSLLGGK | QTYICNVNHKPSNTKVDKKVEPKSCDKTHTCPPCP | GGGTTLTVLGQPKAAP |
| | AALTISGAQPEDEAEYYCALWYSNRWVFGGG | APEAAGGPSVFLFPPKPKDTLMISRTPEVTCVVVD | SVTLFPPSSEELQANK |
| | TKLTVLEPKSSDKTHTCPPCPAPEAAGGPSV | VSHEDPEVKFNWYVDGVEVHNAKTKPREEQYNSTY | ATLVCLISDFYPGAVT |
| | FLFPPKPKDTLMISRTPEVICVVVDVSHEDP | RVVSVLTVLHQDWLNGKEYKCKVSNKALPASIEKT | VAWKADSSPVKAGVET |
| | EVKFNWYVDGVEVHNAKTKPREEQYNSTYRV | ISKAKGQPREPQVYTLPPSREEMTKNQVSLSCAVK | TTPSKQSNNKYAASSY |
| | VSVLTVLHQDWLNGKEYKCKVSNKALPASIE | GFYPSDIAVEWESNGQPENNYKTTPPVLDSDGSFF | LSLTPEQWKSHRSYSC |
| | KTISKAKGQPREPQVYTLPPSREEMTKNQVS | LVSKLTVDKSRWQQGNVFSCSVMHEALHNRYTQKS | QVTHEGSTVEKTVAPT |
| | LWCLVKGFYPSDIAVEWESNGQPENNYKTTP | LSLSPGK | ECS |
| | PVLDSDGSFFLYSKLTVDKSRWQQGNVFSCS | | |
| | VMHEALHNHYTQKSLSLSPGK | | |
| 247 | SEQ ID NO: 831 | SEQ ID NO: 827 | SEQ ID NO: 823 |
| hPGT121.66 | EVQLVESGGGLVQPGGSLRLSCAASGFTFNT | QMQLQESGPGLVKPSETLSLTCSVSGASISDSYWS | SDISVAPGETARISCG |
| AAS + SAV/ | YAMNWVRQAPGKGLEWVGRIRSKYNNYATYY | WIRRSPGKGLEWIGYVHKSGDTNYNPSLKSRVHLS | EKSLGSRAVQWYQHRA |
| huSP34.39.13scFv | ADSVKSRFTISRDDSKNSLYLEMNSLRTEDT | LDTSKNQVSLSLTGVTAADSGKYYCARTLHGRRIY | GQAPSLIIYNNQDRPS |
| AAS + W | AVYYCVRHGNFGHSYVSWFAYWGQGTLVTVS | GIVAFNEWFTYFYMDVWGTGTQVTVSSASTKGPSV | GIPERFSGSPDFRPGT |
| | SGGGGSGGGGSGGGGSGGGGSQAVVTQEPSL | FPLAPSSKSTSGGTAALGCLVKDYFPEPVTVSWNS | TATLTITSVEAGDEAD |
| | TVSPGGTVTLTCGSSTGAVTTGHYANWVQQK | GALTSGVHTFPAVLQSSGLYSLSSVVTVPSSSLGT | YYCHIWDSRVPTKWVF |
| | PGQAPRGLIGGTSNRAPGVPARFSGSLLGGK | QTYICNVNHKPSNTKVDKKVEPKSCDKTHTCPPCP | GGGTTLTVLGQPKAAP |
| | AALTISGAQPEDEAEYYCALWYSNRWVFGGG | APEAAGGPSVFLFPPKPKDTLMISRTPEVTCVVVD | SVTLFPPSSEELQANK |
| | TKLTVLEPKSSDKTHTCPPCPAPEAAGGPSV | VSHEDPEVKFNWYVDGVEVHNAKTKPREEQYNSTY | ATLVCLISDFYPGAVT |
| | FLFPPKPKDTLMISRTPEVICVVVDVSHEDP | RVVSVLTVLHQDWLNGKEYKCKVSNKALPASIEKT | VAWKADSSPVKAGVET |
| | EVKFNWYVDGVEVHNAKTKPREEQYNSTYRV | ISKAKGQPREPQVYTLPPSREEMTKNQVSLSCAVK | TTPSKQSNNKYAASSY |
| | VSVLTVLHQDWLNGKEYKCKVSNKALPASIE | GFYPSDIAVEWESNGQPENNYKTTPPVLDSDGSFF | LSLTPEQWKSHRSYSC |
| | KTISKAKGQPREPQVYTLPPSREEMTKNQVS | LVSKLTVDKSRWQQGNVFSCSVMHEALHNHYTQKS | QVTHEGSTVEKTVAPT |
| | LWCLVKGFYPSDIAVEWESNGQPENNYKTTP | LSLSPGK | ECS |
| | PVLDSDGSFFLYSKLTVDKSRWQQGNVFSCS | | |
| | VMHEALHNHYTQKSLSLSPGK | | |
| 248 | SEQ ID NO: 832 | SEQ ID NO: 833 | SEQ ID NO: 823 |
| hPGT121.66 | EVQLVESGGGLVQPGGSLRLSCAASGFTFNT | QMQLQESGPGLVKPSETLSLTCSVSGASISDSYWS | SDISVAPGETARISCG |
| AAS + W + YTE/ | YAMNWVRQAPGKGLEWVGRIRSKYNNYATYY | WIRRSPGKGLEWIGYVHKSGDTNYNPSLKSRVHLS | EKSLGSRAVQWYQHRA |
| huSP3439.13scFv | ADSVKSRFTISRDDSKNSLYLEMNSLRTEDT | LDTSKNQVSLSLTGVTAADSGKYYCARTLHGRRIY | GQAPSLIIYNNQDRPS |
| AAs + SAV + | AVYYCVRHGNFGHSYVSWFAYWGQGTLVTVS | GIVAFNEWFTYFYMDVWGTGTQVTVSSASTKGPSV | GIPERFSGSPDFRPGT |
| R | SGGGGSGGGGSGGGGSGGGGSQAVVTQEPSL | FPLAPSSKSTSGGTAALGCLVKDYFPEPVTVSWNS | TATLTITSVEAGDEAD |
| | TVSPGGTVTLTCGSSTGAVTTGHYANWVQQK | GALTSGVHTFPAVLQSSGLYSLSSVVTVPSSSLGT | YYCHIWDSRVPTKWVF |
| | PGQAPRGLIGGTSNRAPGVPARFSGSLLGGK | QTYICNVNHKPSNTKVDKKVEPKSCDKTHTCPPCP | GGGTTLTVLGQPKAAP |
| | AALTISGAQPEDEAEYYCALWYSNRWVFGGG | APEAAGGPSVFLFPPKPKDTLYITREPEVTCVVVD | SVTLFPPSSEELQANK |
| | TKLTVLEPKSSDKTHTCPPCPAPEAAGGPSV | VSHEDPEVKFNWYVDGVEVHNAKTKPREEQYNSTY | ATLVCLISDFYPGAVT |
| | FLFPPKPKDTLMISRTPEVICVVVDVSHEDP | RVVSVLTVLHQDWLNGKEYKCKVSNKALPASIEKT | VAWKADSSPVKAGVET |
| | EVKFNWYVDGVEVHNAKTKPREEQYNSTYRV | ISKAKGQPREPQVYTLPPSREEMTKNQVSLWCLVK | TTPSKQSNNKYAASSY |
| | VSVLTVLHQDWLNGKEYKCKVSNKALPASIE | GFYPSDIAVEWESNGQPENNYKTTPPVLDSDGSFF | LSLTPEQWKSHRSYSC |
| | KTISKAKGQPREPQVYTLPPSREEMTKNQVS | LYSKLTVDKSRWQQGNVFSCSVMHEALHNHYTQKS | QVTHEGSTVEKTVAPT |
| | LSCAVKGFYPSDIAVEWESNGQPENNYKTTP | LSLSPGK | ECS |
| | PVLDSDGSFFLVSKLTVDKSRWQQGNVFSCS | | |
| | VMHEALHNRYTQKSLSLSPGK | | |
| 249 | SEQ ID NO: 832 | SEQ ID NO: 829 | SEQ ID NO: 823 |
| hPGT121.66 | EVQLVESGGGLVQPGGSLRLSCAASGFTFNT | QMQLQESGPGLVKPSETLSLTCSVSGASISDSYWS | SDISVAPGETARISCG |
| AAS + W/ | YAMNWVRQAPGKGLEWVGRIRSKYNNYATYY | WIRRSPGKGLEWIGYVHKSGDTNYNPSLKSRVHLS | EKSLGSRAVQWYQHRA |
| huSP34.39.13scFv | ADSVKSRFTISRDDSKNSLYLEMNSLRTEDT | LDTSKNQVSLSLTGVTAADSGKYYCARTLHGRRIY | GQAPSLIIYNNQDRPS |
| AAs + SAV + | AVYYCVRHGNFGHSYVSWFAYWGQGTLVTVS | GIVAFNEWFTYFYMDVWGTGTQVTVSSASTKGPSV | GIPERFSGSPDFRPGT |
| R | SGGGGSGGGGSGGGGSGGGGSQAVVTQEPSL | FPLAPSSKSTSGGTAALGCLVKDYFPEPVTVSWNS | TATLTITSVEAGDEAD |
| | TVSPGGTVTLTCGSSTGAVTTGHYANWVQQK | GALTSGVHTFPAVLQSSGLYSLSSVVTVPSSSLGT | YYCHIWDSRVPTKWVF |
| | PGQAPRGLIGGTSNRAPGVPARFSGSLLGGK | QTYICNVNHKPSNTKVDKKVEPKSCDKTHTCPPCP | GGGTTLTVLGQPKAAP |
| | AALTISGAQPEDEAEYYCALWYSNRWVFGGG | APEAAGGPSVFLFPPKPKDTLMISRTPEVTCVVVD | SVTLFPPSSEELQANK |
| | TKLTVLEPKSSDKTHTCPPCPAPEAAGGPSV | VSHEDPEVKFNWYVDGVEVHNAKTKPREEQYNSTY | ATLVCLISDFYPGAVT |
| | FLFPPKPKDTLMISRTPEVICVVVDVSHEDP | RVVSVLTVLHQDWLNGKEYKCKVSNKALPASIEKT | VAWKADSSPVKAGVET |
| | EVKFNWYVDGVEVHNAKTKPREEQYNSTYRV | ISKAKGQPREPQVYTLPPSREEMTKNQVSLWCLVK | TTPSKQSNNKYAASSY |
| | VSVLTVLHQDWLNGKEYKCKVSNKALPASIE | GFYPSDIAVEWESNGQPENNYKTTPPVLDSDGSFF | LSLTPEQWKSHRSYSC |
| | KTISKAKGQPREPQVYTLPPSREEMTKNQVS | LYSKLTVDKSRWQQGNVFSCSVMHEALHNHYTQKS | QVTHEGSTVEKTVAPT |
| | LSCAVKGFYPSDIAVEWESNGQPENNYKTTP | LSLSPGK | ECS |
| | PVLDSDGSFFLVSKLTVDKSRWQQGNVFSCS | | |
| | VMHEALHNRYTQKSLSLSPGK | | |
| 250 | SEQ ID NO: 834 | SEQ ID NO: 827 | SEQ ID NO: 823 |
| hPGT121.66 | EVQLVESGGGLVQPGGSLRLSCAASGFTFNT | QMQLQESGPGLVKPSETLSLTCSVSGASISDSYWS | SDISVAPGETARISCG |
| AAS + SAV/ | YAMNWVRQAPGKGLEWVGRIRSKYNNYATYY | WIRRSPGKGLEWIGYVHKSGDTNYNPSLKSRVHLS | EKSLGSRAVQWYQHRA |
| huSP34.1.3scFv | AASVKGRFTISRDDSKNSLYLQMNSLKTEDT | LDTSKNQVSLSLTGVTAADSGKYYCARTLHGRRIY | GQAPSLIIYNNQDRPS |
| AAS + W | AMYYCVRHGNFGNSYVSWFAYWGQGTLVTVS | GIVAFNEWFTYFYMDVWGTGTQVTVSSASTKGPSV | GIPERFSGSPDFRPGT |
| | SGGGGSGGGGSGGGGSGGGGSQAVVTQEPSL | FPLAPSSKSTSGGTAALGCLVKDYFPEPVTVSWNS | TATLTITSVEAGDEAD |
| | TVSPGGTVTLTCGSSTGAVTTGHYANWVQQK | GALTSGVHTFPAVLQSSGLYSLSSVVTVPSSSLGT | YYCHIWDSRVPTKWVF |
| | PGQAPRGLIGGTNKRAPWTPARFSGSLLGGK | QTYICNVNHKPSNTKVDKKVEPKSCDKTHTCPPCP | GGGTTLTVLGQPKAAP |
| | AALTLSGAQPEDEAEYYCALWYSNLWVFGGG | APEAAGGPSVFLFPPKPKDTLMISRTPEVTCVVVD | SVTLFPPSSEELQANK |
| | TKLTVLEPKSSDKTHTCPPCPAPEAAGGPSV | VSHEDPEVKFNWYVDGVEVHNAKTKPREEQYNSTY | ATLVCLISDFYPGAVT |
| | FLFPPKPKDTLMISRTPEVICVVVDVSHEDP | RVVSVLTVLHQDWLNGKEYKCKVSNKALPASIEKT | VAWKADSSPVKAGVET |
| | EVKFNWYVDGVEVHNAKTKPREEQYNSTYRV | ISKAKGQPREPQVYTLPPSREEMTKNQVSLSCAVK | TTPSKQSNNKYAASSY |
| | VSVLTVLHQDWLNGKEYKCKVSNKALPASIE | GFYPSDIAVEWESNGQPENNYKTTPPVLDSDGSFF | LSLTPEQWKSHRSYSC |
| | KTISKAKGQPREPQVYTLPPSREEMTKNQVS | LVSKLTVDKSRWQQGNVFSCSVMHEALHNHYTQKS | QVTHEGSTVEKTVAPT |
| | LWCLVKGFYPSDIAVEWESNGQPENNYKTTP | LSLSPGK | ECS |
| | PVLDSDGSFFLYSKLTVDKSRWQQGNVFSCS | | |
| | VMHEALHNHYTQKSLSLSPGK | | |
| 251 | SEQ ID NO: 835 | SEQ ID NO: 829 | SEQ ID NO: 823 |
| hPGT121.66 | EVQLVESGGGLVQPGGSLRLSCAASGFTFNT | QMQLQESGPGLVKPSETLSLTCSVSGASISDSYWS | SDISVAPGETARISCG |
| AAS + W/ | YAMNWVRQAPGKGLEWVGRIRSKYNNYATYY | WIRRSPGKGLEWIGYVHKSGDTNYNPSLKSRVHLS | EKSLGSRAVQWYQHRA |
| huSP34.1.3scFv | AASVKGRFTISRDDSKNSLYLQMNSLKTEDT | LDTSKNQVSLSLTGVTAADSGKYYCARTLHGRRIY | GQAPSLIIYNNQDRPS |
| AAs + SAV + | AMYYCVRHGNFGNSYVSWFAYWGQGTLVTVS | GIVAFNEWFTYFYMDVWGTGTQVTVSSASTKGPSV | GIPERFSGSPDFRPGT |
| RF | SGGGGSGGGGSGGGGSGGGGSQAVVTQEPSL | FPLAPSSKSTSGGTAALGCLVKDYFPEPVTVSWNS | TATLTITSVEAGDEAD |
| | TVSPGGTVTLTCGSSTGAVTTGHYANWVQQK | GALTSGVHTFPAVLQSSGLYSLSSVVTVPSSSLGT | YYCHIWDSRVPTKWVF |
| | PGQAPRGLIGGTNKRAPWTPARFSGSLLGGK | QTYICNVNHKPSNTKVDKKVEPKSCDKTHTCPPCP | GGGTTLTVLGQPKAAP |
| | AALTLSGAQPEDEAEYYCALWYSNLWVFGGG | APEAAGGPSVFLFPPKPKDTLMISRTPEVTCVVVD | SVTLFPPSSEELQANK |
| | TKLTVLEPKSSDKTHTCPPCPAPEAAGGPSV | VSHEDPEVKFNWYVDGVEVHNAKTKPREEQYNSTY | ATLVCLISDFYPGAVT |
| | FLFPPKPKDTLMISRTPEVICVVVDVSHEDP | RVVSVLTVLHQDWLNGKEYKCKVSNKALPASIEKT | VAWKADSSPVKAGVET |
| | EVKFNWYVDGVEVHNAKTKPREEQYNSTYRV | ISKAKGQPREPQVYTLPPSREEMTKNQVSLWCLVK | TTPSKQSNNKYAASSY |
| | VSVLTVLHQDWLNGKEYKCKVSNKALPASIE | GFYPSDIAVEWESNGQPENNYKTTPPVLDSDGSFF | LSLTPEQWKSHRSYSC |
| | KTISKAKGQPREPQVYTLPPSREEMTKNQVS | LYSKLTVDKSRWQQGNVFSCSVMHEALHNHYTQKS | QVTHEGSTVEKTVAPT |
| | LSCAVKGFYPSDIAVEWESNGQPENNYKTTP | LSLSPGK | ECS |
| | PVLDSDGSFFLVSKLTVDKSRWQQGNVFSCS | | |
| | VMHEALHNRFTQKSLSLSPGK | | |
| 252 | SEQ ID NO: 836 | SEQ ID NO: 829 | SEQ ID NO: 823 |
| hPGT121.66 | EVQLVESGGGLVQPGGSLRLSCAASGFTFNT | QMQLQESGPGLVKPSETLSLTCSVSGASISDSYWS | SDISVAPGETARISCG |
| AAS + W/ | YAMNWVRQAPGKGLEWVGRIRSKYNNYATYY | WIRRSPGKGLEWIGYVHKSGDTNYNPSLKSRVHLS | EKSLGSRAVQWYQHRA |
| huSP34.1.3scFv | AASVKGRFTISRDDSKNSLYLQMNSLKTEDT | LDTSKNQVSLSLTGVTAADSGKYYCARTLHGRRIY | GQAPSLIIYNNQDRPS |
| AAs + SAV + | AMYYCVRHGNFGNSYVSWFAYWGQGTLVTVS | GIVAFNEWFTYFYMDVWGTGTQVTVSSASTKGPSV | GIPERFSGSPDFRPGT |
| R | SGGGGSGGGGSGGGGSGGGGSQAVVTQEPSL | FPLAPSSKSTSGGTAALGCLVKDYFPEPVTVSWNS | TATLTITSVEAGDEAD |
| | TVSPGGTVTLTCGSSTGAVTTGHYANWVQQK | GALTSGVHTFPAVLQSSGLYSLSSVVTVPSSSLGT | YYCHIWDSRVPTKWVF |
| | PGQAPRGLIGGTNKRAPWTPARFSGSLLGGK | QTYICNVNHKPSNTKVDKKVEPKSCDKTHTCPPCP | GGGTTLTVLGQPKAAP |
| | AALTLSGAQPEDEAEYYCALWYSNLWVFGGG | APEAAGGPSVFLFPPKPKDTLMISRTPEVTCVVVD | SVTLFPPSSEELQANK |
| | TKLTVLEPKSSDKTHTCPPCPAPEAAGGPSV | VSHEDPEVKFNWYVDGVEVHNAKTKPREEQYNSTY | ATLVCLISDFYPGAVT |
| | FLFPPKPKDTLMISRTPEVICVVVDVSHEDP | RVVSVLTVLHQDWLNGKEYKCKVSNKALPASIEKT | VAWKADSSPVKAGVET |
| | EVKFNWYVDGVEVHNAKTKPREEQYNSTYRV | ISKAKGQPREPQVYTLPPSREEMTKNQVSLWCLVK | TTPSKQSNNKYAASSY |
| | VSVLTVLHQDWLNGKEYKCKVSNKALPASIE | GFYPSDIAVEWESNGQPENNYKTTPPVLDSDGSFF | LSLTPEQWKSHRSYSC |
| | KTISKAKGQPREPQVYTLPPSREEMTKNQVS | LYSKLTVDKSRWQQGNVFSCSVMHEALHNHYTQKS | QVTHEGSTVEKTVAPT |
| | LSCAVKGFYPSDIAVEWESNGQPENNYKTTP | LSLSPGK | ECS |
| | PVLDSDGSFFLVSKLTVDKSRWQQGNVFSCS | | |
| | VMHEALHNRYTQKSLSLSPGK | | |
| 253 | SEQ ID NO: 837 | SEQ ID NO: 833 | SEQ ID NO: 823 |
| hPGT121.66 | EVQLVESGGGLVQPGGSLRLSCAASGFTFNT | QMQLQESGPGLVKPSETLSLTCSVSGASISDSYWS | SDISVAPGETARISCG |
| AAS + W + YTE/ | YAMNWVRQAPGKGLEWVGRIRSKYNNYATYY | WIRRSPGKGLEWIGYVHKSGDTNYNPSLKSRVHLS | EKSLGSRAVQWYQHRA |
| huSP34.1.3scFv | AASVKGRFTISRDDSKNSLYLQMNSLKTEDT | LDTSKNQVSLSLTGVTAADSGKYYCARTLHGRRIY | GQAPSLIIYNNQDRPS |
| AAS + SAV + | AMYYCVRHGNFGNSYVSWFAYWGQGTLVTVS | GIVAFNEWFTYFYMDVWGTGTQVTVSSASTKGPSV | GIPERFSGSPDFRPGT |
| R | SGGGGSGGGGSGGGGSGGGGSQAVVTQEPSL | FPLAPSSKSTSGGTAALGCLVKDYFPEPVTVSWNS | TATLTITSVEAGDEAD |
| | TVSPGGTVTLTCGSSTGAVTTGHYANWVQQK | GALTSGVHTFPAVLQSSGLYSLSSVVTVPSSSLGT | YYCHIWDSRVPTKWVF |
| | PGQAPRGLIGGTNKRAPWTPARFSGSLLGGK | QTYICNVNHKPSNTKVDKKVEPKSCDKTHTCPPCP | GGGTTLTVLGQPKAAP |
| | AALTLSGAQPEDEAEYYCALWYSNLWVFGGG | APEAAGGPSVFLFPPKPKDTLYITREPEVTCVVVD | SVTLFPPSSEELQANK |
| | TKLTVLEPKSSDKTHTCPPCPAPEAAGGPSV | VSHEDPEVKFNWYVDGVEVHNAKTKPREEQYNSTY | ATLVCLISDFYPGAVT |
| | FLFPPKPKDTLMISRTPEVICVVVDVSHEDP | RVVSVLTVLHQDWLNGKEYKCKVSNKALPASIEKT | VAWKADSSPVKAGVET |
| | EVKFNWYVDGVEVHNAKTKPREEQYNSTYRV | ISKAKGQPREPQVYTLPPSREEMTKNQVSLWCLVK | TTPSKQSNNKYAASSY |
| | VSVLTVLHQDWLNGKEYKCKVSNKALPASIE | GFYPSDIAVEWESNGQPENNYKTTPPVLDSDGSFF | LSLTPEQWKSHRSYSC |
| | KTISKAKGQPREPQVYTLPPSREEMTKNQVS | LYSKLTVDKSRWQQGNVFSCSVMHEALHNHYTQKS | QVTHEGSTVEKTVAPT |
| | LSCAVKGFYPSDIAVEWESNGQPENNYKTTP | LSLSPGK | ECS |
| | PVLDSDGSFFLVSKLTVDKSRWQQGNVFSCS | | |
| | VMHEALHNRYTQKSLSLSPGK | | |
| 254 | SEQ ID NO: 837 | SEQ ID NO: 838 | SEQ ID NO: 823 |
| hPGT121.66 | EVQLVESGGGLVQPGGSLRLSCAASGFTFNT | QMQLQESGPGLVKPSETLSLTCSVSGASISDSYWS | SDISVAPGETARISCG |
| AAS + W + LS/ | YAMNWVRQAPGKGLEWVGRIRSKYNNYATYY | WIRRSPGKGLEWIGYVHKSGDTNYNPSLKSRVHLS | EKSLGSRAVQWYQHRA |
| huSP34.1.3 scFv | AASVKGRFTISRDDSKNSLYLQMNSLKTEDT | LDTSKNQVSLSLTGVTAADSGKYYCARTLHGRRIY | GQAPSLIIYNNQDRPS |
| AAS + SAV + | AMYYCVRHGNFGNSYVSWFAYWGQGTLVTVS | GIVAFNEWFTYFYMDVWGTGTQVTVSSASTKGPSV | GIPERFSGSPDFRPGT |
| R | SGGGGSGGGGSGGGGSGGGGSQAVVTQEPSL | FPLAPSSKSTSGGTAALGCLVKDYFPEPVTVSWNS | TATLTITSVEAGDEAD |
| | TVSPGGTVTLTCGSSTGAVTTGHYANWVQQK | GALTSGVHTFPAVLQSSGLYSLSSVVTVPSSSLGT | YYCHIWDSRVPTKWVF |
| | PGQAPRGLIGGTNKRAPWTPARFSGSLLGGK | QTYICNVNHKPSNTKVDKKVEPKSCDKTHTCPPCP | GGGTTLTVLGQPKAAP |
| | AALTLSGAQPEDEAEYYCALWYSNLWVFGGG | APEAAGGPSVFLFPPKPKDTLMISRTPEVTCVVVD | SVTLFPPSSEELQANK |
| | TKLTVLEPKSSDKTHTCPPCPAPEAAGGPSV | VSHEDPEVKFNWYVDGVEVHNAKTKPREEQYNSTY | ATLVCLISDFYPGAVT |
| | FLFPPKPKDTLMISRTPEVICVVVDVSHEDP | RVVSVLTVLHQDWLNGKEYKCKVSNKALPASIEKT | VAWKADSSPVKAGVET |
| | EVKFNWYVDGVEVHNAKTKPREEQYNSTYRV | ISKAKGQPREPQVYTLPPSREEMTKNQVSLWCLVK | TTPSKQSNNKYAASSY |
| | VSVLTVLHQDWLNGKEYKCKVSNKALPASIE | GFYPSDIAVEWESNGQPENNYKTTPPVLDSDGSFF | LSLTPEQWKSHRSYSC |
| | KTISKAKGQPREPQVYTLPPSREEMTKNQVS | LYSKLTVDKSRWQQGNVFSCSVLHEALHSHYTQKS | QVTHEGSTVEKTVAPT |
| | LSCAVKGFYPSDIAVEWESNGQPENNYKTTP | LSLSPGK | ECS |
| | PVLDSDGSFFLVSKLTVDKSRWQQGNVFSCS | | |
| | VMHEALHNRYTQKSLSLSPGK | | |
| 255 | SEQ ID NO: 839 | SEQ ID NO: 840 | SEQ ID NO: 823 |
| hPGT121.66 | EVQLVESGGGLVQPGGSLRLSCAASGFTFNT | QMQLQESGPGLVKPSETLSLTCSVSGASISDSYWS | SDISVAPGETARISCG |
| W/ | YAMNWVRQAPGKGLEWVGRIRSKYNNYATYY | WIRRSPGKGLEWIGYVHKSGDTNYNPSLKSRVHLS | EKSLGSRAVQWYQHRA |
| huSP34.1.3scFv | AASVKGRFTISRDDSKNSLYLQMNSLKTEDT | LDTSKNQVSLSLTGVTAADSGKYYCARTLHGRRIY | GQAPSLIIYNNQDRPS |
| SAV + R | AMYYCVRHGNFGNSYVSWFAYWGQGTLVTVS | GIVAFNEWFTYFYMDVWGTGTQVTVSSASTKGPSV | GIPERFSGSPDFRPGT |
| | SGGGGSGGGGSGGGGSGGGGSQAVVTQEPSL | FPLAPSSKSTSGGTAALGCLVKDYFPEPVTVSWNS | TATLTITSVEAGDEAD |
| | TVSPGGTVTLTCGSSTGAVTTGHYANWVQQK | GALTSGVHTFPAVLQSSGLYSLSSVVTVPSSSLGT | YYCHIWDSRVPTKWVF |
| | PGQAPRGLIGGTNKRAPWTPARFSGSLLGGK | QTYICNVNHKPSNTKVDKKVEPKSCDKTHTCPPCP | GGGTTLTVLGQPKAAP |
| | AALTLSGAQPEDEAEYYCALWYSNLWVFGGG | APELLGGPSVFLFPPKPKDTLMISRTPEVTCVVVD | SVTLFPPSSEELQANK |
| | TKLTVLEPKSSDKTHTCPPCPAPELLGGPSV | VSHEDPEVKFNWYVDGVEVHNAKTKPREEQYNSTY | ATLVCLISDFYPGAVT |
| | FLFPPKPKDTLMISRTPEVICVVVDVSHEDP | RVVSVLTVLHQDWLNGKEYKCKVSNKALPAPIEKT | VAWKADSSPVKAGVET |
| | EVKFNWYVDGVEVHNAKTKPREEQYNSTYRV | ISKAKGQPREPQVYTLPPSREEMTKNQVSLWCLVK | TTPSKQSNNKYAASSY |
| | VSVLTVLHQDWLNGKEYKCKVSNKALPAPIE | GFYPSDIAVEWESNGQPENNYKTTPPVLDSDGSFF | LSLTPEQWKSHRSYSC |
| | KTISKAKGQPREPQVYTLPPSREEMTKNQVS | LYSKLTVDKSRWQQGNVFSCSVMHEALHNHYTQKS | QVTHEGSTVEKTVAPT |
| | LSCAVKGFYPSDIAVEWESNGQPENNYKTTP | LSLSPGK | ECS |
| | PVLDSDGSFFLVSKLTVDKSRWQQGNVFSCS | | |
| | VMHEALHNRYTQKSLSLSPGK | | |
| 256 | SEQ ID NO: 841 | SEQ ID NO: 829 | SEQ ID NO: 823 |
| hPGT121.66 | EVQLVESGGGLVQPGGSLRLSCAASGFTFNT | QMQLQESGPGLVKPSETLSLTCSVSGASISDSYWS | SDISVAPGETARISCG |
| AAS + W/ | YAMNWVRQAPGKGLEWVGRIRSKYNNYATYY | WIRRSPGKGLEWIGYVHKSGDTNYNPSLKSRVHLS | EKSLGSRAVQWYQHRA |
| huSP34.3.8scFv | ADSVKGRFTISRDDSKNSLYLQMNSLRTEDT | LDTSKNQVSLSLTGVTAADSGKYYCARTLHGRRIY | GQAPSLIIYNNQDRPS |
| AAS + SAV + | AVYYCVRHGNFGHSYVSWFAYWGQGTLVTVS | GIVAFNEWFTYFYMDVWGTGTQVTVSSASTKGPSV | GIPERFSGSPDFRPGT |
| R | SGGGGSGGGGSGGGGSGGGGSQAVVTQEPSL | FPLAPSSKSTSGGTAALGCLVKDYFPEPVTVSWNS | TATLTITSVEAGDEAD |
| | TVSPGGTVTLTCGSSTGAVTTGHYANWVQQK | GALTSGVHTFPAVLQSSGLYSLSSVVTVPSSSLGT | YYCHIWDSRVPTKWVF |
| | PGQAPRGLIGGTNKRAPGVPARFSGSLLGGK | QTYICNVNHKPSNTKVDKKVEPKSCDKTHTCPPCP | GGGTTLTVLGQPKAAP |
| | AALTISGAQPEDEAEYYCALWYSNRWVFGGG | APEAAGGPSVFLFPPKPKDTLMISRTPEVTCVVVD | SVTLFPPSSEELQANK |
| | TKLTVLEPKSSDKTHTCPPCPAPEAAGGPSV | VSHEDPEVKFNWYVDGVEVHNAKTKPREEQYNSTY | ATLVCLISDFYPGAVT |
| | FLFPPKPKDTLMISRTPEVICVVVDVSHEDP | RVVSVLTVLHQDWLNGKEYKCKVSNKALPASIEKT | VAWKADSSPVKAGVET |
| | EVKFNWYVDGVEVHNAKTKPREEQYNSTYRV | ISKAKGQPREPQVYTLPPSREEMTKNQVSLWCLVK | TTPSKQSNNKYAASSY |
| | VSVLTVLHQDWLNGKEYKCKVSNKALPASIE | GFYPSDIAVEWESNGQPENNYKTTPPVLDSDGSFF | LSLTPEQWKSHRSYSC |
| | KTISKAKGQPREPQVYTLPPSREEMTKNQVS | LYSKLTVDKSRWQQGNVFSCSVMHEALHNHYTQKS | QVTHEGSTVEKTVAPT |
| | LSCAVKGFYPSDIAVEWESNGQPENNYKTTP | LSLSPGK | ECS |
| | PVLDSDGSFFLVSKLTVDKSRWQQGNVFSCS | | |
| | VMHEALHNRYTQKSLSLSPGK | | |
| 257 | SEQ ID NO: 842 | SEQ ID NO: 829 | SEQ ID NO: 823 |
| hPGT121.66 | EVQLVESGGGLVQPGGSLRLSCAASGFTFNT | QMQLQESGPGLVKPSETLSLTCSVSGASISDSYWS | SDISVAPGETARISCG |
| AAS + W/ | YAMNWVRQAPGKGLEWVGRIRSKYNNYATYY | WIRRSPGKGLEWIGYVHKSGDTNYNPSLKSRVHLS | EKSLGSRAVQWYQHRA |
| huSP34.34.3scFv | AASVKGRFTISRDDSKNSLYLQMNSLKTEDT | LDTSKNQVSLSLTGVTAADSGKYYCARTLHGRRIY | GQAPSLIIYNNQDRPS |
| AAS + SAV + | AMYYCVRHGNFGHSYVSWFAYWGQGTLVTVS | GIVAFNEWFTYFYMDVWGTGTQVTVSSASTKGPSV | GIPERFSGSPDFRPGT |
| R | SGGGGSGGGGSGGGGSGGGGSQAVVTQEPSL | FPLAPSSKSTSGGTAALGCLVKDYFPEPVTVSWNS | TATLTITSVEAGDEAD |
| | TVSPGGTVTLTCGSSTGAVTTGHYANWVQQK | GALTSGVHTFPAVLQSSGLYSLSSVVTVPSSSLGT | YYCHIWDSRVPTKWVF |
| | PGQAPRGLIGGTNKRAPWTPARFSGSLLGGK | QTYICNVNHKPSNTKVDKKVEPKSCDKTHTCPPCP | GGGTTLTVLGQPKAAP |
| | AALTLSGAQPEDEAEYYCALWYSNLWVFGGG | APEAAGGPSVFLFPPKPKDTLMISRTPEVTCVVVD | SVTLFPPSSEELQANK |
| | TKLTVLEPKSSDKTHTCPPCPAPEAAGGPSV | VSHEDPEVKFNWYVDGVEVHNAKTKPREEQYNSTY | ATLVCLISDFYPGAVT |
| | FLFPPKPKDTLMISRTPEVICVVVDVSHEDP | RVVSVLTVLHQDWLNGKEYKCKVSNKALPASIEKT | VAWKADSSPVKAGVET |
| | EVKFNWYVDGVEVHNAKTKPREEQYNSTYRV | ISKAKGQPREPQVYTLPPSREEMTKNQVSLWCLVK | TTPSKQSNNKYAASSY |
| | VSVLTVLHQDWLNGKEYKCKVSNKALPASIE | GFYPSDIAVEWESNGQPENNYKTTPPVLDSDGSFF | LSLTPEQWKSHRSYSC |
| | KTISKAKGQPREPQVYTLPPSREEMTKNQVS | LYSKLTVDKSRWQQGNVFSCSVMHEALHNHYTQKS | QVTHEGSTVEKTVAPT |
| | LSCAVKGFYPSDIAVEWESNGQPENNYKTTP | LSLSPGK | ECS |
| | PVLDSDGSFFLVSKLTVDKSRWQQGNVFSCS | | |
| | VMHEALHNRYTQKSLSLSPGK | | |
| 278 | SEQ ID NO: 861 | SEQ ID NO: 862 | SEQ ID NO: 863 |
| 10-1074 | EVQLVESGGGLVQPGGSLRLSCAASGFTFNT | QVQLQESGPGLVKPSETLSVTCSVSGDSMNNYYWT | SYVRPLSVALGETARI |
| AAS + SAV + | YAMNWVRQAPGKGLEWVGRIRSKYNNYATYY | WIRQSPGKGLEWIGYISDRESATYNPSLNSRVVIS | SCGRQALGSRAVQWYQ |
| YTE/ | ADSVKGRFTISRDDSKNSLYLQMNSLRTEDT | RDTSKNQLSLKLNSVTPADTAVYYCATARRGQRIY | HRPGQAPILLIYNNQD |
| huSP34.3.13scFv | AVYYCVRHGNFGHSYVSWFAYWGQGTLVTVS | GVVSFGEFFYYYSMDVWGKGTTVIVSSASTKGPSV | RPSGIPERFSGTPDIN |
| AAS + W + YTE | SGGGGSGGGGSGGGGSGGGGSQAVVTQEPSL | FPLAPSSKSTSGGTAALGCLVKDYFPEPVTVSWNS | FGTRATLTISGVEAGD |
| | TVSPGGTVTLTCGSSTGAVTTGHYANWVQQK | GALTSGVHTFPAVLQSSGLYSLSSVVTVPSSSLGT | EADYYCHMWDSRSGFS |
| | PGQAPRGLIGGTSNRAPGVPARFSGSLLGGK | QTYICNVNHKPSNTKVDKKVEPKSCDKTHTCPPCP | WSFGGATRLTVLGQPK |
| | AALTISGAQPEDEAEYYCALWYSNRWVFGGG | APEAAGGPSVFLFPPKPKDTLYITREPEVTCVVVD | AAPSVTLFPPSSEELQ |
| | TKLTVLEPKSSDKTHTCPPCPAPEAAGGPSV | VSHEDPEVKFNWYVDGVEVHNAKTKPREEQYNSTY | ANKATLVCLISDFYPG |
| | FLFPPKPKDTLYITREPEVTCVVVDVSHEDP | RVVSVLTVLHQDWLNGKEYKCKVSNKALPASIEKT | AVTVAWKADSSPVKAG |
| | EVKFNWYVDGVEVHNAKTKPREEQYNSTYRV | ISKAKGQPREPQVYTLPPSREEMTKNQVSLSCAVK | VETTTPSKQSNNKYAA |
| | VSVLTVLHQDWLNGKEYKCKVSNKALPASIE | GFYPSDIAVEWESNGQPENNYKTTPPVLDSDGSFF | SSYLSLTPEQWKSHRS |
| | KTISKAKGQPREPQVYTLPPSREEMTKNQVS | LVSKLTVDKSRWQQGNVFSCSVMHEALHNHYTQKS | YSCQVTHEGSTVEKTV |
| | LWCLVKGFYPSDIAVEWESNGQPENNYKTTP | LSLSPGK | APTECS |
| | PVLDSDGSFFLYSKLTVDKSRWQQGNVFSCS | | |
| | VMHEALHNHYTQKSLSLSPGK | | |
| 279 | SEQ ID NO: 861 | SEQ ID NO: 864 | SEQ ID NO: 863 |
| 10-1074 | EVQLVESGGGLVQPGGSLRLSCAASGFTFNT | QVQLQESGPGLVKPSETLSVTCSVSGDSMNNYYWT | SYVRPLSVALGETARI |
| AAS + SAV + | YAMNWVRQAPGKGLEWVGRIRSKYNNYATYY | WIRQSPGKGLEWIGYISDRESATYNPSLNSRVVIS | SCGRQALGSRAVQWYQ |
| R/huSP34 | ADSVKGRFTISRDDSKNSLYLQMNSLRTEDT | RDTSKNQLSLKLNSVTPADTAVYYCATARRGQRIY | HRPGQAPILLIYNNQD |
| 3.13scFv | AVYYCVRHGNFGHSYVSWFAYWGQGTLVTVS | GVVSFGEFFYYYSMDVWGKGTTVIVSSASTKGPSV | RPSGIPERFSGTPDIN |
| AAS + W + YT | SGGGGSGGGGSGGGGSGGGGSQAVVTQEPSL | FPLAPSSKSTSGGTAALGCLVKDYFPEPVTVSWNS | FGTRATLTISGVEAGD |
| E | TVSPGGTVTLTCGSSTGAVTTGHYANWVQQK | GALTSGVHTFPAVLQSSGLYSLSSVVTVPSSSLGT | EADYYCHMWDSRSGFS |
| | PGQAPRGLIGGTSNRAPGVPARFSGSLLGGK | QTYICNVNHKPSNTKVDKKVEPKSCDKTHTCPPCP | WSFGGATRLTVLGQPK |
| | AALTISGAQPEDEAEYYCALWYSNRWVFGGG | APEAAGGPSVFLFPPKPKDTLMISRTPEVTCVVVD | AAPSVTLFPPSSEELQ |
| | TKLTVLEPKSSDKTHTCPPCPAPEAAGGPSV | VSHEDPEVKFNWYVDGVEVHNAKTKPREEQYNSTY | ANKATLVCLISDFYPG |
| | FLFPPKPKDTLYITREPEVTCVVVDVSHEDP | RVVSVLTVLHQDWLNGKEYKCKVSNKALPASIEKT | AVTVAWKADSSPVKAG |
| | EVKFNWYVDGVEVHNAKTKPREEQYNSTYRV | ISKAKGQPREPQVYTLPPSREEMTKNQVSLSCAVK | VETTTPSKQSNNKYAA |
| | VSVLTVLHQDWLNGKEYKCKVSNKALPASIE | GFYPSDIAVEWESNGQPENNYKTTPPVLDSDGSFF | SSYLSLTPEQWKSHRS |
| | KTISKAKGQPREPQVYTLPPSREEMTKNQVS | LVSKLTVDKSRWQQGNVFSCSVMHEALHNRYTQKS | YSCQVTHEGSTVEKTV |
| | LWCLVKGFYPSDIAVEWESNGQPENNYKTTP | LSLSPGK | APTECS |
| | PVLDSDGSFFLYSKLTVDKSRWQQGNVFSCS | | |
| | VMHEALHNHYTQKSLSLSPGK | | |
| 280 | SEQ ID NO: 865 | SEQ ID NO: 864 | SEQ ID NO: 863 |
| 10-1074 | EVQLVESGGGLVQPGGSLRLSCAASGFTFNT | QVQLQESGPGLVKPSETLSVTCSVSGDSMNNYYWT | SYVRPLSVALGETARI |
| AAS + SAV + | YAMNWVRQAPGKGLEWVGRIRSKYNNYATYY | WIRQSPGKGLEWIGYISDRESATYNPSLNSRVVIS | SCGRQALGSRAVQWYQ |
| R/ | ADSVKGRFTISRDDSKNSLYLQMNSLRTEDT | RDTSKNQLSLKLNSVTPADTAVYYCATARRGQRIY | HRPGQAPILLIYNNQD |
| huSP343.13scFv | AVYYCVRHGNFGHSYVSWFAYWGQGTLVTVS | GVVSFGEFFYYYSMDVWGKGTTVIVSSASTKGPSV | RPSGIPERFSGTPDIN |
| AAS + W | SGGGGSGGGGSGGGGSGGGGSQAVVTQEPSL | FPLAPSSKSTSGGTAALGCLVKDYFPEPVTVSWNS | FGTRATLTISGVEAGD |
| | TVSPGGTVTLTCGSSTGAVTTGHYANWVQQK | GALTSGVHTFPAVLQSSGLYSLSSVVTVPSSSLGT | EADYYCHMWDSRSGFS |
| | PGQAPRGLIGGTSNRAPGVPARFSGSLLGGK | QTYICNVNHKPSNTKVDKKVEPKSCDKTHTCPPCP | WSFGGATRLTVLGQPK |
| | AALTISGAQPEDEAEYYCALWYSNRWVFGGG | APEAAGGPSVFLFPPKPKDTLMISRTPEVTCVVVD | AAPSVTLFPPSSEELQ |
| | TKLTVLEPKSSDKTHTCPPCPAPEAAGGPSV | VSHEDPEVKFNWYVDGVEVHNAKTKPREEQYNSTY | ANKATLVCLISDFYPG |
| | FLFPPKPKDTLMISRTPEVICVVVDVSHEDP | RVVSVLTVLHQDWLNGKEYKCKVSNKALPASIEKT | AVTVAWKADSSPVKAG |
| | EVKFNWYVDGVEVHNAKTKPREEQYNSTYRV | ISKAKGQPREPQVYTLPPSREEMTKNQVSLSCAVK | VETTTPSKQSNNKYAA |
| | VSVLTVLHQDWLNGKEYKCKVSNKALPASIE | GFYPSDIAVEWESNGQPENNYKTTPPVLDSDGSFF | SSYLSLTPEQWKSHRS |
| | KTISKAKGQPREPQVYTLPPSREEMTKNQVS | LVSKLTVDKSRWQQGNVFSCSVMHEALHNRYTQKS | YSCQVTHEGSTVEKTV |
| | LWCLVKGFYPSDIAVEWESNGQPENNYKTTP | LSLSPGK | APTECS |
| | PVLDSDGSFFLYSKLTVDKSRWQQGNVFSCS | | |
| | VMHEALHNHYTQKSLSLSPGK | | |
| 281 | SEQ ID NO: 865 | SEQ ID NO: 866 | SEQ ID NO: 863 |
| 10-1074 | EVQLVESGGGLVQPGGSLRLSCAASGFTFNT | QVQLQESGPGLVKPSETLSVTCSVSGDSMNNYYWT | SYVRPLSVALGETARI |
| AAS + SAV/ | YAMNWVRQAPGKGLEWVGRIRSKYNNYATYY | WIRQSPGKGLEWIGYISDRESATYNPSLNSRVVIS | SCGRQALGSRAVQWYQ |
| huSP34.3.13scFv | ADSVKGRFTISRDDSKNSLYLQMNSLRTEDT | RDTSKNQLSLKLNSVTPADTAVYYCATARRGQRIY | HRPGQAPILLIYNNQD |
| AAS + W | AVYYCVRHGNFGHSYVSWFAYWGQGTLVTVS | GVVSFGEFFYYYSMDVWGKGTTVIVSSASTKGPSV | RPSGIPERFSGTPDIN |
| | SGGGGSGGGGSGGGGSGGGGSQAVVTQEPSL | FPLAPSSKSTSGGTAALGCLVKDYFPEPVTVSWNS | FGTRATLTISGVEAGD |
| | TVSPGGTVTLTCGSSTGAVTTGHYANWVQQK | GALTSGVHTFPAVLQSSGLYSLSSVVTVPSSSLGT | EADYYCHMWDSRSGFS |
| | PGQAPRGLIGGTSNRAPGVPARFSGSLLGGK | QTYICNVNHKPSNTKVDKKVEPKSCDKTHTCPPCP | WSFGGATRLTVLGQPK |
| | AALTISGAQPEDEAEYYCALWYSNRWVFGGG | APEAAGGPSVFLFPPKPKDTLMISRTPEVTCVVVD | AAPSVTLFPPSSEELQ |
| | TKLTVLEPKSSDKTHTCPPCPAPEAAGGPSV | VSHEDPEVKFNWYVDGVEVHNAKTKPREEQYNSTY | ANKATLVCLISDFYPG |
| | FLFPPKPKDTLMISRTPEVICVVVDVSHEDP | RVVSVLTVLHQDWLNGKEYKCKVSNKALPASIEKT | AVTVAWKADSSPVKAG |
| | EVKFNWYVDGVEVHNAKTKPREEQYNSTYRV | ISKAKGQPREPQVYTLPPSREEMTKNQVSLSCAVK | VETTTPSKQSNNKYAA |
| | VSVLTVLHQDWLNGKEYKCKVSNKALPASIE | GFYPSDIAVEWESNGQPENNYKTTPPVLDSDGSFF | SSYLSLTPEQWKSHRS |
| | KTISKAKGQPREPQVYTLPPSREEMTKNQVS | LVSKLTVDKSRWQQGNVFSCSVMHEALHNHYTQKS | YSCQVTHEGSTVEKTV |
| | LWCLVKGFYPSDIAVEWESNGQPENNYKTTP | LSLSPGK | APTECS |
| | PVLDSDGSFFLYSKLTVDKSRWQQGNVFSCS | | |
| | VMHEALHNHYTQKSLSLSPGK | | |
| 282 | SEQ ID NO: 867 | SEQ ID NO: 868 | SEQ ID NO: 863 |
| 10-1074 | EVQLVESGGGLVQPGGSLRLSCAASGFTFNT | QVQLQESGPGLVKPSETLSVTCSVSGDSMNNYYWT | SYVRPLSVALGETARI |
| AAS + W/ | YAMNWVRQAPGKGLEWVGRIRSKYNNYATYY | WIRQSPGKGLEWIGYISDRESATYNPSLNSRVVIS | SCGRQALGSRAVQWYQ |
| huSP34.3.13scFv | ADSVKGRFTISRDDSKNSLYLQMNSLRTEDT | RDTSKNQLSLKLNSVTPADTAVYYCATARRGQRIY | HRPGQAPILLIYNNQD |
| AAS + SAV + | AVYYCVRHGNFGHSYVSWFAYWGQGTLVTVS | GVVSFGEFFYYYSMDVWGKGTTVIVSSASTKGPSV | RPSGIPERFSGTPDIN |
| R | SGGGGSGGGGSGGGGSGGGGSQAVVTQEPSL | FPLAPSSKSTSGGTAALGCLVKDYFPEPVTVSWNS | FGTRATLTISGVEAGD |
| | TVSPGGTVTLTCGSSTGAVTTGHYANWVQQK | GALTSGVHTFPAVLQSSGLYSLSSVVTVPSSSLGT | EADYYCHMWDSRSGFS |
| | PGQAPRGLIGGTSNRAPGVPARFSGSLLGGK | QTYICNVNHKPSNTKVDKKVEPKSCDKTHTCPPCP | WSFGGATRLTVLGQPK |
| | AALTISGAQPEDEAEYYCALWYSNRWVFGGG | APEAAGGPSVFLFPPKPKDTLMISRTPEVTCVVVD | AAPSVTLFPPSSEELQ |
| | TKLTVLEPKSSDKTHTCPPCPAPEAAGGPSV | VSHEDPEVKFNWYVDGVEVHNAKTKPREEQYNSTY | ANKATLVCLISDFYPG |
| | FLFPPKPKDTLMISRTPEVICVVVDVSHEDP | RVVSVLTVLHQDWLNGKEYKCKVSNKALPASIEKT | AVTVAWKADSSPVKAG |
| | EVKFNWYVDGVEVHNAKTKPREEQYNSTYRV | ISKAKGQPREPQVYTLPPSREEMTKNQVSLWCLVK | VETTTPSKQSNNKYAA |
| | VSVLTVLHQDWLNGKEYKCKVSNKALPASIE | GFYPSDIAVEWESNGQPENNYKTTPPVLDSDGSFF | SSYLSLTPEQWKSHRS |
| | KTISKAKGQPREPQVYTLPPSREEMTKNQVS | LYSKLTVDKSRWQQGNVFSCSVMHEALHNHYTQKS | YSCQVTHEGSTVEKTV |
| | LSCAVKGFYPSDIAVEWESNGQPENNYKTTP | LSLSPGK | APTECS |
| | PVLDSDGSFFLVSKLTVDKSRWQQGNVFSCS | | |
| | VMHEALHNRYTQKSLSLSPGK | | |
| 283 | SEQ ID NO: 869 | SEQ ID NO: 862 | SEQ ID NO: 863 |
| 10-1074 | EVQLVESGGGLVQPGGSLRLSCAASGFTFNT | QVQLQESGPGLVKPSETLSVTCSVSGDSMNNYYWT | SYVRPLSVALGETARI |
| AAS + SAV + | YAMNWVRQAPGKGLEWVGRIRSKYNNYATYY | WIRQSPGKGLEWIGYISDRESATYNPSLNSRVVIS | SCGRQALGSRAVQWYQ |
| YTE/ | ADSVKSRFTISRDDSKNSLYLEMNSLRTEDT | RDTSKNQLSLKLNSVTPADTAVYYCATARRGQRIY | HRPGQAPILLIYNNQD |
| huSP34.39.13scFv | AVYYCVRHGNFGHSYVSWFAYWGQGTLVTVS | GVVSFGEFFYYYSMDVWGKGTTVIVSSASTKGPSV | RPSGIPERFSGTPDIN |
| AAS + W + YTE | SGGGGSGGGGSGGGGSGGGGSQAVVTQEPSL | FPLAPSSKSTSGGTAALGCLVKDYFPEPVTVSWNS | FGTRATLTISGVEAGD |
| | TVSPGGTVTLTCGSSTGAVTTGHYANWVQQK | GALTSGVHTFPAVLQSSGLYSLSSVVTVPSSSLGT | EADYYCHMWDSRSGFS |
| | PGQAPRGLIGGTSNRAPGVPARFSGSLLGGK | QTYICNVNHKPSNTKVDKKVEPKSCDKTHTCPPCP | WSFGGATRLTVLGQPK |
| | AALTISGAQPEDEAEYYCALWYSNRWVFGGG | APEAAGGPSVFLFPPKPKDTLYITREPEVTCVVVD | AAPSVTLFPPSSEELQ |
| | TKLTVLEPKSSDKTHTCPPCPAPEAAGGPSV | VSHEDPEVKFNWYVDGVEVHNAKTKPREEQYNSTY | ANKATLVCLISDFYPG |
| | FLFPPKPKDTLYITREPEVTCVVVDVSHEDP | RVVSVLTVLHQDWLNGKEYKCKVSNKALPASIEKT | AVTVAWKADSSPVKAG |
| | EVKFNWYVDGVEVHNAKTKPREEQYNSTYRV | ISKAKGQPREPQVYTLPPSREEMTKNQVSLSCAVK | VETTTPSKQSNNKYAA |
| | VSVLTVLHQDWLNGKEYKCKVSNKALPASIE | GFYPSDIAVEWESNGQPENNYKTTPPVLDSDGSFF | SSYLSLTPEQWKSHRS |
| | KTISKAKGQPREPQVYTLPPSREEMTKNQVS | LVSKLTVDKSRWQQGNVFSCSVMHEALHNHYTQKS | YSCQVTHEGSTVEKTV |
| | LWCLVKGFYPSDIAVEWESNGQPENNYKTTP | LSLSPGK | APTECS |
| | PVLDSDGSFFLYSKLTVDKSRWQQGNVFSCS | | |
| | VMHEALHNHYTQKSLSLSPGK | | |
| 284 | SEQ ID NO: 869 | SEQ ID NO: 864 | SEQ ID NO: 863 |
| 10-1074 | EVQLVESGGGLVQPGGSLRLSCAASGFTFNT | QVQLQESGPGLVKPSETLSVTCSVSGDSMNNYYWT | SYVRPLSVALGETARI |
| AAS + SAV + | YAMNWVRQAPGKGLEWVGRIRSKYNNYATYY | WIRQSPGKGLEWIGYISDRESATYNPSLNSRVVIS | SCGRQALGSRAVQWYQ |
| R/ | ADSVKSRFTISRDDSKNSLYLEMNSLRTEDT | RDTSKNQLSLKLNSVTPADTAVYYCATARRGQRIY | HRPGQAPILLIYNNQD |
| huSP34.39.13scFv | AVYYCVRHGNFGHSYVSWFAYWGQGTLVTVS | GVVSFGEFFYYYSMDVWGKGTTVIVSSASTKGPSV | RPSGIPERFSGTPDIN |
| AAS + W + YTE | SGGGGSGGGGSGGGGSGGGGSQAVVTQEPSL | FPLAPSSKSTSGGTAALGCLVKDYFPEPVTVSWNS | FGTRATLTISGVEAGD |
| | TVSPGGTVTLTCGSSTGAVTTGHYANWVQQK | GALTSGVHTFPAVLQSSGLYSLSSVVTVPSSSLGT | EADYYCHMWDSRSGFS |
| | PGQAPRGLIGGTSNRAPGVPARFSGSLLGGK | QTYICNVNHKPSNTKVDKKVEPKSCDKTHTCPPCP | WSFGGATRLTVLGQPK |
| | AALTISGAQPEDEAEYYCALWYSNRWVFGGG | APEAAGGPSVFLFPPKPKDTLMISRTPEVTCVVVD | AAPSVTLFPPSSEELQ |
| | TKLTVLEPKSSDKTHTCPPCPAPEAAGGPSV | VSHEDPEVKFNWYVDGVEVHNAKTKPREEQYNSTY | ANKATLVCLISDFYPG |
| | FLFPPKPKDTLYITREPEVTCVVVDVSHEDP | RVVSVLTVLHQDWLNGKEYKCKVSNKALPASIEKT | AVTVAWKADSSPVKAG |
| | EVKFNWYVDGVEVHNAKTKPREEQYNSTYRV | ISKAKGQPREPQVYTLPPSREEMTKNQVSLSCAVK | VETTTPSKQSNNKYAA |
| | VSVLTVLHQDWLNGKEYKCKVSNKALPASIE | GFYPSDIAVEWESNGQPENNYKTTPPVLDSDGSFF | SSYLSLTPEQWKSHRS |
| | KTISKAKGQPREPQVYTLPPSREEMTKNQVS | LVSKLTVDKSRWQQGNVFSCSVMHEALHNRYTQKS | YSCQVTHEGSTVEKTV |
| | LWCLVKGFYPSDIAVEWESNGQPENNYKTTP | LSLSPGK | APTECS |
| | PVLDSDGSFFLYSKLTVDKSRWQQGNVFSCS | | |
| | VMHEALHNHYTQKSLSLSPGK | | |
| 285 | SEQ ID NO: 870 | SEQ ID NO: 864 | SEQ ID NO: 863 |
| 10-1074 | EVQLVESGGGLVQPGGSLRLSCAASGFTFNT | QVQLQESGPGLVKPSETLSVTCSVSGDSMNNYYWT | SYVRPLSVALGETARI |
| AAS + SAV + | YAMNWVRQAPGKGLEWVGRIRSKYNNYATYY | WIRQSPGKGLEWIGYISDRESATYNPSLNSRVVIS | SCGRQALGSRAVQWYQ |
| R/ | ADSVKSRFTISRDDSKNSLYLEMNSLRTEDT | RDTSKNQLSLKLNSVTPADTAVYYCATARRGQRIY | HRPGQAPILLIYNNQD |
| huSP34.39.13sc | AVYYCVRHGNFGHSYVSWFAYWGQGTLVTVS | GVVSFGEFFYYYSMDVWGKGTTVIVSSASTKGPSV | RPSGIPERFSGTPDIN |
| Fv AAS + W | SGGGGSGGGGSGGGGSGGGGSQAVVTQEPSL | FPLAPSSKSTSGGTAALGCLVKDYFPEPVTVSWNS | FGTRATLTISGVEAGD |
| | TVSPGGTVTLTCGSSTGAVTTGHYANWVQQK | GALTSGVHTFPAVLQSSGLYSLSSVVTVPSSSLGT | EADYYCHMWDSRSGFS |
| | PGQAPRGLIGGTSNRAPGVPARFSGSLLGGK | QTYICNVNHKPSNTKVDKKVEPKSCDKTHTCPPCP | WSFGGATRLTVLGQPK |
| | AALTISGAQPEDEAEYYCALWYSNRWVFGGG | APEAAGGPSVFLFPPKPKDTLMISRTPEVTCVVVD | AAPSVTLFPPSSEELQ |
| | TKLTVLEPKSSDKTHTCPPCPAPEAAGGPSV | VSHEDPEVKFNWYVDGVEVHNAKTKPREEQYNSTY | ANKATLVCLISDFYPG |
| | FLFPPKPKDTLMISRTPEVICVVVDVSHEDP | RVVSVLTVLHQDWLNGKEYKCKVSNKALPASIEKT | AVTVAWKADSSPVKAG |
| | EVKFNWYVDGVEVHNAKTKPREEQYNSTYRV | ISKAKGQPREPQVYTLPPSREEMTKNQVSLSCAVK | VETTTPSKQSNNKYAA |
| | VSVLTVLHQDWLNGKEYKCKVSNKALPASIE | GFYPSDIAVEWESNGQPENNYKTTPPVLDSDGSFF | SSYLSLTPEQWKSHRS |
| | KTISKAKGQPREPQVYTLPPSREEMTKNQVS | LVSKLTVDKSRWQQGNVFSCSVMHEALHNRYTQKS | YSCQVTHEGSTVEKTV |
| | LWCLVKGFYPSDIAVEWESNGQPENNYKTTP | LSLSPGK | APTECS |
| | PVLDSDGSFFLYSKLTVDKSRWQQGNVFSCS | | |
| | VMHEALHNHYTQKSLSLSPGK | | |
| 286 | SEQ ID NO: 870 | SEQ ID NO: 866 | SEQ ID NO: 863 |
| 10-1074 | EVQLVESGGGLVQPGGSLRLSCAASGFTFNT | QVQLQESGPGLVKPSETLSVTCSVSGDSMNNYYWT | SYVRPLSVALGETARI |
| AAS + SAV/ | YAMNWVRQAPGKGLEWVGRIRSKYNNYATYY | WIRQSPGKGLEWIGYISDRESATYNPSLNSRVVIS | SCGRQALGSRAVQWYQ |
| huSP34.39.13scFv | ADSVKSRFTISRDDSKNSLYLEMNSLRTEDT | RDTSKNQLSLKLNSVTPADTAVYYCATARRGQRIY | HRPGQAPILLIYNNQD |
| AAS + W | AVYYCVRHGNFGHSYVSWFAYWGQGTLVTVS | GVVSFGEFFYYYSMDVWGKGTTVIVSSASTKGPSV | RPSGIPERFSGTPDIN |
| | SGGGGSGGGGSGGGGSGGGGSQAVVTQEPSL | FPLAPSSKSTSGGTAALGCLVKDYFPEPVTVSWNS | FGTRATLTISGVEAGD |
| | TVSPGGTVTLTCGSSTGAVTTGHYANWVQQK | GALTSGVHTFPAVLQSSGLYSLSSVVTVPSSSLGT | EADYYCHMWDSRSGFS |
| | PGQAPRGLIGGTSNRAPGVPARFSGSLLGGK | QTYICNVNHKPSNTKVDKKVEPKSCDKTHTCPPCP | WSFGGATRLTVLGQPK |
| | AALTISGAQPEDEAEYYCALWYSNRWVFGGG | APEAAGGPSVFLFPPKPKDTLMISRTPEVTCVVVD | AAPSVTLFPPSSEELQ |
| | TKLTVLEPKSSDKTHTCPPCPAPEAAGGPSV | VSHEDPEVKFNWYVDGVEVHNAKTKPREEQYNSTY | ANKATLVCLISDFYPG |
| | FLFPPKPKDTLMISRTPEVICVVVDVSHEDP | RVVSVLTVLHQDWLNGKEYKCKVSNKALPASIEKT | AVTVAWKADSSPVKAG |
| | EVKFNWYVDGVEVHNAKTKPREEQYNSTYRV | ISKAKGQPREPQVYTLPPSREEMTKNQVSLSCAVK | VETTTPSKQSNNKYAA |
| | VSVLTVLHQDWLNGKEYKCKVSNKALPASIE | GFYPSDIAVEWESNGQPENNYKTTPPVLDSDGSFF | SSYLSLTPEQWKSHRS |
| | KTISKAKGQPREPQVYTLPPSREEMTKNQVS | LVSKLTVDKSRWQQGNVFSCSVMHEALHNHYTQKS | YSCQVTHEGSTVEKTV |
| | LWCLVKGFYPSDIAVEWESNGQPENNYKTTP | LSLSPGK | APTECS |
| | PVLDSDGSFFLYSKLTVDKSRWQQGNVFSCS | | |
| | VMHEALHNHYTQKSLSLSPGK | | |
| 287 | SEQ ID NO: 871 | SEQ ID NO: 872 | SEQ ID NO: 863 |
| 10-1074 | EVQLVESGGGLVQPGGSLRLSCAASGFTFNT | QVQLQESGPGLVKPSETLSVTCSVSGDSMNNYYWT | SYVRPLSVALGETARI |
| AAS + W + | YAMNWVRQAPGKGLEWVGRIRSKYNNYATYY | WIRQSPGKGLEWIGYISDRESATYNPSLNSRVVIS | SCGRQALGSRAVQWYQ |
| YTE/ | ADSVKSRFTISRDDSKNSLYLEMNSLRTEDT | RDTSKNQLSLKLNSVTPADTAVYYCATARRGQRIY | HRPGQAPILLIYNNQD |
| huSP34.39.13scFv | AVYYCVRHGNFGHSYVSWFAYWGQGTLVTVS | GVVSFGEFFYYYSMDVWGKGTTVIVSSASTKGPSV | RPSGIPERFSGTPDIN |
| AAS + SAV + | SGGGGSGGGGSGGGGSGGGGSQAVVTQEPSL | FPLAPSSKSTSGGTAALGCLVKDYFPEPVTVSWNS | FGTRATLTISGVEAGD |
| R | TVSPGGTVTLTCGSSTGAVTTGHYANWVQQK | GALTSGVHTFPAVLQSSGLYSLSSVVTVPSSSLGT | EADYYCHMWDSRSGFS |
| | PGQAPRGLIGGTSNRAPGVPARFSGSLLGGK | QTYICNVNHKPSNTKVDKKVEPKSCDKTHTCPPCP | WSFGGATRLTVLGQPK |
| | AALTISGAQPEDEAEYYCALWYSNRWVFGGG | APEAAGGPSVFLFPPKPKDTLYITREPEVTCVVVD | AAPSVTLFPPSSEELQ |
| | TKLTVLEPKSSDKTHTCPPCPAPEAAGGPSV | VSHEDPEVKFNWYVDGVEVHNAKTKPREEQYNSTY | ANKATLVCLISDFYPG |
| | FLFPPKPKDTLMISRTPEVICVVVDVSHEDP | RVVSVLTVLHQDWLNGKEYKCKVSNKALPASIEKT | AVTVAWKADSSPVKAG |
| | EVKFNWYVDGVEVHNAKTKPREEQYNSTYRV | ISKAKGQPREPQVYTLPPSREEMTKNQVSLWCLVK | VETTTPSKQSNNKYAA |
| | VSVLTVLHQDWLNGKEYKCKVSNKALPASIE | GFYPSDIAVEWESNGQPENNYKTTPPVLDSDGSFF | SSYLSLTPEQWKSHRS |
| | KTISKAKGQPREPQVYTLPPSREEMTKNQVS | LYSKLTVDKSRWQQGNVFSCSVMHEALHNHYTQKS | YSCQVTHEGSTVEKTV |
| | LSCAVKGFYPSDIAVEWESNGQPENNYKTTP | LSLSPGK | APTECS |
| | PVLDSDGSFFLVSKLTVDKSRWQQGNVFSCS | | |
| | VMHEALHNRYTQKSLSLSPGK | | |
| 288 | SEQ ID NO: 871 | SEQ ID NO: 868 | SEQ ID NO: 863 |
| 10-1074 | EVQLVESGGGLVQPGGSLRLSCAASGFTFNT | QVQLQESGPGLVKPSETLSVTCSVSGDSMNNYYWT | SYVRPLSVALGETARI |
| AAS + W/ | YAMNWVRQAPGKGLEWVGRIRSKYNNYATYY | WIRQSPGKGLEWIGYISDRESATYNPSLNSRVVIS | SCGRQALGSRAVQWYQ |
| huSP34.39.13scFv | ADSVKSRFTISRDDSKNSLYLEMNSLRTEDT | RDTSKNQLSLKLNSVTPADTAVYYCATARRGQRIY | HRPGQAPILLIYNNQD |
| AAS + SAV + | AVYYCVRHGNFGHSYVSWFAYWGQGTLVTVS | GVVSFGEFFYYYSMDVWGKGTTVIVSSASTKGPSV | RPSGIPERFSGTPDIN |
| R | SGGGGSGGGGSGGGGSGGGGSQAVVTQEPSL | FPLAPSSKSTSGGTAALGCLVKDYFPEPVTVSWNS | FGTRATLTISGVEAGD |
| | TVSPGGTVTLTCGSSTGAVTTGHYANWVQQK | GALTSGVHTFPAVLQSSGLYSLSSVVTVPSSSLGT | EADYYCHMWDSRSGFS |
| | PGQAPRGLIGGTSNRAPGVPARFSGSLLGGK | QTYICNVNHKPSNTKVDKKVEPKSCDKTHTCPPCP | WSFGGATRLTVLGQPK |
| | AALTISGAQPEDEAEYYCALWYSNRWVFGGG | APEAAGGPSVFLFPPKPKDTLMISRTPEVTCVVVD | AAPSVTLFPPSSEELQ |
| | TKLTVLEPKSSDKTHTCPPCPAPEAAGGPSV | VSHEDPEVKFNWYVDGVEVHNAKTKPREEQYNSTY | ANKATLVCLISDFYPG |
| | FLFPPKPKDTLMISRTPEVICVVVDVSHEDP | RVVSVLTVLHQDWLNGKEYKCKVSNKALPASIEKT | AVTVAWKADSSPVKAG |
| | EVKFNWYVDGVEVHNAKTKPREEQYNSTYRV | ISKAKGQPREPQVYTLPPSREEMTKNQVSLWCLVK | VETTTPSKQSNNKYAA |
| | VSVLTVLHQDWLNGKEYKCKVSNKALPASIE | GFYPSDIAVEWESNGQPENNYKTTPPVLDSDGSFF | SSYLSLTPEQWKSHRS |
| | KTISKAKGQPREPQVYTLPPSREEMTKNQVS | LYSKLTVDKSRWQQGNVFSCSVMHEALHNHYTQKS | YSCQVTHEGSTVEKTV |
| | LSCAVKGFYPSDIAVEWESNGQPENNYKTTP | LSLSPGK | APTECS |
| | PVLDSDGSFFLVSKLTVDKSRWQQGNVFSCS | | |
| | VMHEALHNRYTQKSLSLSPGK | | |
| 289 | SEQ ID NO: 873 | SEQ ID NO: 862 | SEQ ID NO: 863 |
| 10-1074 | EVQLVESGGGLVQPGGSLRLSCAASGFTFNT | QVQLQESGPGLVKPSETLSVTCSVSGDSMNNYYWT | SYVRPLSVALGETARI |
| AAS + SAV + | YAMNWVRQAPGKGLEWVGRIRSKYNNYATYY | WIRQSPGKGLEWIGYISDRESATYNPSLNSRVVIS | SCGRQALGSRAVQWYQ |
| YTE/ | AASVKGRFTISRDDSKNSLYLQMNSLKTEDT | RDTSKNQLSLKLNSVTPADTAVYYCATARRGQRIY | HRPGQAPILLIYNNQD |
| huSP34.1.3scFv | AMYYCVRHGNFGNSYVSWFAYWGQGTLVTVS | GVVSFGEFFYYYSMDVWGKGTTVIVSSASTKGPSV | RPSGIPERFSGTPDIN |
| AAS + W + YTE | SGGGGSGGGGSGGGGSGGGGSQAVVTQEPSL | FPLAPSSKSTSGGTAALGCLVKDYFPEPVTVSWNS | FGTRATLTISGVEAGD |
| | TVSPGGTVTLTCGSSTGAVTTGHYANWVQQK | GALTSGVHTFPAVLQSSGLYSLSSVVTVPSSSLGT | EADYYCHMWDSRSGFS |
| | PGQAPRGLIGGTNKRAPWTPARFSGSLLGGK | QTYICNVNHKPSNTKVDKKVEPKSCDKTHTCPPCP | WSFGGATRLTVLGQPK |
| | AALTLSGAQPEDEAEYYCALWYSNLWVFGGG | APEAAGGPSVFLFPPKPKDTLYITREPEVTCVVVD | AAPSVTLFPPSSEELQ |
| | TKLTVLEPKSSDKTHTCPPCPAPEAAGGPSV | VSHEDPEVKFNWYVDGVEVHNAKTKPREEQYNSTY | ANKATLVCLISDFYPG |
| | FLFPPKPKDTLYITREPEVTCVVVDVSHEDP | RVVSVLTVLHQDWLNGKEYKCKVSNKALPASIEKT | AVTVAWKADSSPVKAG |
| | EVKFNWYVDGVEVHNAKTKPREEQYNSTYRV | ISKAKGQPREPQVYTLPPSREEMTKNQVSLSCAVK | VETTTPSKQSNNKYAA |
| | VSVLTVLHQDWLNGKEYKCKVSNKALPASIE | GFYPSDIAVEWESNGQPENNYKTTPPVLDSDGSFF | SSYLSLTPEQWKSHRS |
| | KTISKAKGQPREPQVYTLPPSREEMTKNQVS | LVSKLTVDKSRWQQGNVFSCSVMHEALHNHYTQKS | YSCQVTHEGSTVEKTV |
| | LWCLVKGFYPSDIAVEWESNGQPENNYKTTP | LSLSPGK | APTECS |
| | PVLDSDGSFFLYSKLTVDKSRWQQGNVFSCS | | |
| | VMHEALHNHYTQKSLSLSPGK | | |
| 290 | SEQ ID NO: 874 | SEQ ID NO: 866 | SEQ ID NO: 863 |
| 10-1074 | EVQLVESGGGLVQPGGSLRLSCAASGFTFNT | QVQLQESGPGLVKPSETLSVTCSVSGDSMNNYYWT | SYVRPLSVALGETARI |
| AAS + SAV/ | YAMNWVRQAPGKGLEWVGRIRSKYNNYATYY | WIRQSPGKGLEWIGYISDRESATYNPSLNSRVVIS | SCGRQALGSRAVQWYQ |
| huSP34.1.3scFv | AASVKGRFTISRDDSKNSLYLQMNSLKTEDT | RDTSKNQLSLKLNSVTPADTAVYYCATARRGQRIY | HRPGQAPILLIYNNQD |
| AAS + W | AMYYCVRHGNFGNSYVSWFAYWGQGTLVTVS | GVVSFGEFFYYYSMDVWGKGTTVIVSSASTKGPSV | RPSGIPERFSGTPDIN |
| | SGGGGSGGGGSGGGGSGGGGSQAVVTQEPSL | FPLAPSSKSTSGGTAALGCLVKDYFPEPVTVSWNS | FGTRATLTISGVEAGD |
| | TVSPGGTVTLTCGSSTGAVTTGHYANWVQQK | GALTSGVHTFPAVLQSSGLYSLSSVVTVPSSSLGT | EADYYCHMWDSRSGFS |
| | PGQAPRGLIGGTNKRAPWTPARFSGSLLGGK | QTYICNVNHKPSNTKVDKKVEPKSCDKTHTCPPCP | WSFGGATRLTVLGQPK |
| | AALTLSGAQPEDEAEYYCALWYSNLWVFGGG | APEAAGGPSVFLFPPKPKDTLMISRTPEVTCVVVD | AAPSVTLFPPSSEELQ |
| | TKLTVLEPKSSDKTHTCPPCPAPEAAGGPSV | VSHEDPEVKFNWYVDGVEVHNAKTKPREEQYNSTY | ANKATLVCLISDFYPG |
| | FLFPPKPKDTLMISRTPEVICVVVDVSHEDP | RVVSVLTVLHQDWLNGKEYKCKVSNKALPASIEKT | AVTVAWKADSSPVKAG |
| | EVKFNWYVDGVEVHNAKTKPREEQYNSTYRV | ISKAKGQPREPQVYTLPPSREEMTKNQVSLSCAVK | VETTTPSKQSNNKYAA |
| | VSVLTVLHQDWLNGKEYKCKVSNKALPASIE | GFYPSDIAVEWESNGQPENNYKTTPPVLDSDGSFF | SSYLSLTPEQWKSHRS |
| | KTISKAKGQPREPQVYTLPPSREEMTKNQVS | LVSKLTVDKSRWQQGNVFSCSVMHEALHNHYTQKS | YSCQVTHEGSTVEKTV |
| | LWCLVKGFYPSDIAVEWESNGQPENNYKTTP | LSLSPGK | APTECS |
| | PVLDSDGSFFLYSKLTVDKSRWQQGNVFSCS | | |
| | VMHEALHNHYTQKSLSLSPGK | | |
| 291 | SEQ ID NO: 875 | SEQ ID NO: 872 | SEQ ID NO: 863 |
| 10-1074 | EVQLVESGGGLVQPGGSLRLSCAASGFTFNT | QVQLQESGPGLVKPSETLSVTCSVSGDSMNNYYWT | SYVRPLSVALGETARI |
| AAS + W + YTE/ | YAMNWVRQAPGKGLEWVGRIRSKYNNYATYY | WIRQSPGKGLEWIGYISDRESATYNPSLNSRVVIS | SCGRQALGSRAVQWYQ |
| huSP34.1.3 | AASVKGRFTISRDDSKNSLYLQMNSLKTEDT | RDTSKNQLSLKLNSVTPADTAVYYCATARRGQRIY | HRPGQAPILLIYNNQD |
| scFv | AMYYCVRHGNFGNSYVSWFAYWGQGTLVTVS | GVVSFGEFFYYYSMDVWGKGTTVIVSSASTKGPSV | RPSGIPERFSGTPDIN |
| AAS + SAV + | SGGGGSGGGGSGGGGSGGGGSQAVVTQEPSL | FPLAPSSKSTSGGTAALGCLVKDYFPEPVTVSWNS | FGTRATLTISGVEAGD |
| R | TVSPGGTVTLTCGSSTGAVTTGHYANWVQQK | GALTSGVHTFPAVLQSSGLYSLSSVVTVPSSSLGT | EADYYCHMWDSRSGFS |
| | PGQAPRGLIGGTNKRAPWTPARFSGSLLGGK | QTYICNVNHKPSNTKVDKKVEPKSCDKTHTCPPCP | WSFGGATRLTVLGQPK |
| | AALTLSGAQPEDEAEYYCALWYSNLWVFGGG | APEAAGGPSVFLFPPKPKDTLYITREPEVTCVVVD | AAPSVTLFPPSSEELQ |
| | TKLTVLEPKSSDKTHTCPPCPAPEAAGGPSV | VSHEDPEVKFNWYVDGVEVHNAKTKPREEQYNSTY | ANKATLVCLISDFYPG |
| | FLFPPKPKDTLMISRTPEVICVVVDVSHEDP | RVVSVLTVLHQDWLNGKEYKCKVSNKALPASIEKT | AVTVAWKADSSPVKAG |
| | EVKFNWYVDGVEVHNAKTKPREEQYNSTYRV | ISKAKGQPREPQVYTLPPSREEMTKNQVSLWCLVK | VETTTPSKQSNNKYAA |
| | VSVLTVLHQDWLNGKEYKCKVSNKALPASIE | GFYPSDIAVEWESNGQPENNYKTTPPVLDSDGSFF | SSYLSLTPEQWKSHRS |
| | KTISKAKGQPREPQVYTLPPSREEMTKNQVS | LYSKLTVDKSRWQQGNVFSCSVMHEALHNHYTQKS | YSCQVTHEGSTVEKTV |
| | LSCAVKGFYPSDIAVEWESNGQPENNYKTTP | LSLSPGK | APTECS |
| | PVLDSDGSFFLVSKLTVDKSRWQQGNVFSCS | | |
| | VMHEALHNRYTQKSLSLSPGK | | |
| 292 | SEQ ID NO: 875 | SEQ ID NO: 868 | SEQ ID NO: 863 |
| 10-1074 | EVQLVESGGGLVQPGGSLRLSCAASGFTFNT | QVQLQESGPGLVKPSETLSVTCSVSGDSMNNYYWT | SYVRPLSVALGETARI |
| AAS + W/ | YAMNWVRQAPGKGLEWVGRIRSKYNNYATYY | WIRQSPGKGLEWIGYISDRESATYNPSLNSRVVIS | SCGRQALGSRAVQWYQ |
| huSP34.1.3 | AASVKGRFTISRDDSKNSLYLQMNSLKTEDT | RDTSKNQLSLKLNSVTPADTAVYYCATARRGQRIY | HRPGQAPILLIYNNQD |
| scFv | AMYYCVRHGNFGNSYVSWFAYWGQGTLVTVS | GVVSFGEFFYYYSMDVWGKGTTVIVSSASTKGPSV | RPSGIPERFSGTPDIN |
| AAS + SAV + | SGGGGSGGGGSGGGGSGGGGSQAVVTQEPSL | FPLAPSSKSTSGGTAALGCLVKDYFPEPVTVSWNS | FGTRATLTISGVEAGD |
| R | TVSPGGTVTLTCGSSTGAVTTGHYANWVQQK | GALTSGVHTFPAVLQSSGLYSLSSVVTVPSSSLGT | EADYYCHMWDSRSGFS |
| | PGQAPRGLIGGTNKRAPWTPARFSGSLLGGK | QTYICNVNHKPSNTKVDKKVEPKSCDKTHTCPPCP | WSFGGATRLTVLGQPK |
| | AALTLSGAQPEDEAEYYCALWYSNLWVFGGG | APEAAGGPSVFLFPPKPKDTLMISRTPEVTCVVVD | AAPSVTLFPPSSEELQ |
| | TKLTVLEPKSSDKTHTCPPCPAPEAAGGPSV | VSHEDPEVKFNWYVDGVEVHNAKTKPREEQYNSTY | ANKATLVCLISDFYPG |
| | FLFPPKPKDTLMISRTPEVICVVVDVSHEDP | RVVSVLTVLHQDWLNGKEYKCKVSNKALPASIEKT | AVTVAWKADSSPVKAG |
| | EVKFNWYVDGVEVHNAKTKPREEQYNSTYRV | ISKAKGQPREPQVYTLPPSREEMTKNQVSLWCLVK | VETTTPSKQSNNKYAA |
| | VSVLTVLHQDWLNGKEYKCKVSNKALPASIE | GFYPSDIAVEWESNGQPENNYKTTPPVLDSDGSFF | SSYLSLTPEQWKSHRS |
| | KTISKAKGQPREPQVYTLPPSREEMTKNQVS | LYSKLTVDKSRWQQGNVFSCSVMHEALHNHYTQKS | YSCQVTHEGSTVEKTV |
| | LSCAVKGFYPSDIAVEWESNGQPENNYKTTP | LSLSPGK | APTECS |
| | PVLDSDGSFFLVSKLTVDKSRWQQGNVFSCS | | |
| | VMHEALHNRYTQKSLSLSPGK | | |
| 293 | SEQ ID NO: 875 | SEQ ID NO: 876 | SEQ ID NO: 863 |
| 10-1074 | EVQLVESGGGLVQPGGSLRLSCAASGFTFNT | QVQLQESGPGLVKPSETLSVTCSVSGDSMNNYYWT | SYVRPLSVALGETARI |
| AAS + W + LS/ | YAMNWVRQAPGKGLEWVGRIRSKYNNYATYY | WIRQSPGKGLEWIGYISDRESATYNPSLNSRVVIS | SCGRQALGSRAVQWYQ |
| huSP34.1.3 scFv | AASVKGRFTISRDDSKNSLYLQMNSLKTEDT | RDTSKNQLSLKLNSVTPADTAVYYCATARRGQRIY | HRPGQAPILLIYNNQD |
| AAS + SAV + | AMYYCVRHGNFGNSYVSWFAYWGQGTLVTVS | GVVSFGEFFYYYSMDVWGKGTTVIVSSASTKGPSV | RPSGIPERFSGTPDIN |
| R | SGGGGSGGGGSGGGGSGGGGSQAVVTQEPSL | FPLAPSSKSTSGGTAALGCLVKDYFPEPVTVSWNS | FGTRATLTISGVEAGD |
| | TVSPGGTVTLTCGSSTGAVTTGHYANWVQQK | GALTSGVHTFPAVLQSSGLYSLSSVVTVPSSSLGT | EADYYCHMWDSRSGFS |
| | PGQAPRGLIGGTNKRAPWTPARFSGSLLGGK | QTYICNVNHKPSNTKVDKKVEPKSCDKTHTCPPCP | WSFGGATRLTVLGQPK |
| | AALTLSGAQPEDEAEYYCALWYSNLWVFGGG | APEAAGGPSVFLFPPKPKDTLMISRTPEVTCVVVD | AAPSVTLFPPSSEELQ |
| | TKLTVLEPKSSDKTHTCPPCPAPEAAGGPSV | VSHEDPEVKFNWYVDGVEVHNAKTKPREEQYNSTY | ANKATLVCLISDFYPG |
| | FLFPPKPKDTLMISRTPEVICVVVDVSHEDP | RVVSVLTVLHQDWLNGKEYKCKVSNKALPASIEKT | AVTVAWKADSSPVKAG |
| | EVKFNWYVDGVEVHNAKTKPREEQYNSTYRV | ISKAKGQPREPQVYTLPPSREEMTKNQVSLWCLVK | VETTTPSKQSNNKYAA |
| | VSVLTVLHQDWLNGKEYKCKVSNKALPASIE | GFYPSDIAVEWESNGQPENNYKTTPPVLDSDGSFF | SSYLSLTPEQWKSHRS |
| | KTISKAKGQPREPQVYTLPPSREEMTKNQVS | LYSKLTVDKSRWQQGNVFSCSVLHEALHSHYTQKS | YSCQVTHEGSTVEKTV |
| | LSCAVKGFYPSDIAVEWESNGQPENNYKTTP | LSLSPGK | APTECS |
| | PVLDSDGSFFLVSKLTVDKSRWQQGNVFSCS | | |
| | VMHEALHNRYTQKSLSLSPGK | | |
| 294 | SEQ ID NO: 877 | SEQ ID NO: 862 | SEQ ID NO: 863 |
| 10-1074 | EVQLVESGGGLVQPGGSLRLSCAASGFTFNT | QVQLQESGPGLVKPSETLSVTCSVSGDSMNNYYWT | SYVRPLSVALGETARI |
| AAS + SAV + | YAMNWVRQAPGKGLEWVGRIRSKYNNYATYY | WIRQSPGKGLEWIGYISDRESATYNPSLNSRVVIS | SCGRQALGSRAVQWYQ |
| YTE/ | ADSVKGRFTISRDDSKNSLYLQMNSLRTEDT | RDTSKNQLSLKLNSVTPADTAVYYCATARRGQRIY | HRPGQAPILLIYNNQD |
| huSP34.3.8scFv | AVYYCVRHGNFGHSYVSWFAYWGQGTLVTVS | GVVSFGEFFYYYSMDVWGKGTTVIVSSASTKGPSV | RPSGIPERFSGTPDIN |
| AAS + W + YTE | SGGGGSGGGGSGGGGSGGGGSQAVVTQEPSL | FPLAPSSKSTSGGTAALGCLVKDYFPEPVTVSWNS | FGTRATLTISGVEAGD |
| | TVSPGGTVTLTCGSSTGAVTTGHYANWVQQK | GALTSGVHTFPAVLQSSGLYSLSSVVTVPSSSLGT | EADYYCHMWDSRSGFS |
| | PGQAPRGLIGGTNKRAPGVPARFSGSLLGGK | QTYICNVNHKPSNTKVDKKVEPKSCDKTHTCPPCP | WSFGGATRLTVLGQPK |
| | AALTISGAQPEDEAEYYCALWYSNRWVFGGG | APEAAGGPSVFLFPPKPKDTLYITREPEVTCVVVD | AAPSVTLFPPSSEELQ |
| | TKLTVLEPKSSDKTHTCPPCPAPEAAGGPSV | VSHEDPEVKFNWYVDGVEVHNAKTKPREEQYNSTY | ANKATLVCLISDFYPG |
| | FLFPPKPKDTLYITREPEVTCVVVDVSHEDP | RVVSVLTVLHQDWLNGKEYKCKVSNKALPASIEKT | AVTVAWKADSSPVKAG |
| | EVKFNWYVDGVEVHNAKTKPREEQYNSTYRV | ISKAKGQPREPQVYTLPPSREEMTKNQVSLSCAVK | VETTTPSKQSNNKYAA |
| | VSVLTVLHQDWLNGKEYKCKVSNKALPASIE | GFYPSDIAVEWESNGQPENNYKTTPPVLDSDGSFF | SSYLSLTPEQWKSHRS |
| | KTISKAKGQPREPQVYTLPPSREEMTKNQVS | LVSKLTVDKSRWQQGNVFSCSVMHEALHNHYTQKS | YSCQVTHEGSTVEKTV |
| | LWCLVKGFYPSDIAVEWESNGQPENNYKTTP | LSLSPGK | APTECS |
| | PVLDSDGSFFLYSKLTVDKSRWQQGNVFSCS | | |
| | VMHEALHNHYTQKSLSLSPGK | | |
| 295 | SEQ ID NO: 878 | SEQ ID NO: 866 | SEQ ID NO: 863 |
| 10-1074 | EVQLVESGGGLVQPGGSLRLSCAASGFTFNT | QVQLQESGPGLVKPSETLSVTCSVSGDSMNNYYWT | SYVRPLSVALGETARI |
| AAS + SAV/ | YAMNWVRQAPGKGLEWVGRIRSKYNNYATYY | WIRQSPGKGLEWIGYISDRESATYNPSLNSRVVIS | SCGRQALGSRAVQWYQ |
| huSP34.3.8scFv | ADSVKGRFTISRDDSKNSLYLQMNSLRTEDT | RDTSKNQLSLKLNSVTPADTAVYYCATARRGQRIY | HRPGQAPILLIYNNQD |
| AAS + W | AVYYCVRHGNFGHSYVSWFAYWGQGTLVTVS | GVVSFGEFFYYYSMDVWGKGTTVIVSSASTKGPSV | RPSGIPERFSGTPDIN |
| | SGGGGSGGGGSGGGGSGGGGSQAVVTQEPSL | FPLAPSSKSTSGGTAALGCLVKDYFPEPVTVSWNS | FGTRATLTISGVEAGD |
| | TVSPGGTVTLTCGSSTGAVTTGHYANWVQQK | GALTSGVHTFPAVLQSSGLYSLSSVVTVPSSSLGT | EADYYCHMWDSRSGFS |
| | PGQAPRGLIGGTNKRAPGVPARFSGSLLGGK | QTYICNVNHKPSNTKVDKKVEPKSCDKTHTCPPCP | WSFGGATRLTVLGQPK |
| | AALTISGAQPEDEAEYYCALWYSNRWVFGGG | APEAAGGPSVFLFPPKPKDTLMISRTPEVTCVVVD | AAPSVTLFPPSSEELQ |
| | TKLTVLEPKSSDKTHTCPPCPAPEAAGGPSV | VSHEDPEVKFNWYVDGVEVHNAKTKPREEQYNSTY | ANKATLVCLISDFYPG |
| | FLFPPKPKDTLMISRTPEVICVVVDVSHEDP | RVVSVLTVLHQDWLNGKEYKCKVSNKALPASIEKT | AVTVAWKADSSPVKAG |
| | EVKFNWYVDGVEVHNAKTKPREEQYNSTYRV | ISKAKGQPREPQVYTLPPSREEMTKNQVSLSCAVK | VETTTPSKQSNNKYAA |
| | VSVLTVLHQDWLNGKEYKCKVSNKALPASIE | GFYPSDIAVEWESNGQPENNYKTTPPVLDSDGSFF | SSYLSLTPEQWKSHRS |
| | KTISKAKGQPREPQVYTLPPSREEMTKNQVS | LVSKLTVDKSRWQQGNVFSCSVMHEALHNHYTQKS | YSCQVTHEGSTVEKTV |
| | LWCLVKGFYPSDIAVEWESNGQPENNYKTTP | LSLSPGK | APTECS |
| | PVLDSDGSFFLYSKLTVDKSRWQQGNVFSCS | | |
| | VMHEALHNHYTQKSLSLSPGK | | |
| 296 | SEQ ID NO: 879 | SEQ ID NO: 862 | SEQ ID NO: 863 |
| 10-1074 | EVQLVESGGGLVQPGGSLRLSCAASGFTFNT | QVQLQESGPGLVKPSETLSVTCSVSGDSMNNYYWT | SYVRPLSVALGETARI |
| AAS + SAV | YAMNWVRQAPGKGLEWVGRIRSKYNNYATYY | WIRQSPGKGLEWIGYISDRESATYNPSLNSRVVIS | SCGRQALGSRAVQWYQ |
| YTE/ | AASVKGRFTISRDDSKNSLYLQMNSLKTEDT | RDTSKNQLSLKLNSVTPADTAVYYCATARRGQRIY | HRPGQAPILLIYNNQD |
| huSP34.34.3scFv | AMYYCVRHGNFGHSYVSWFAYWGQGTLVTVS | GVVSFGEFFYYYSMDVWGKGTTVIVSSASTKGPSV | RPSGIPERFSGTPDIN |
| AAS + W + YTE | SGGGGSGGGGSGGGGSGGGGSQAVVTQEPSL | FPLAPSSKSTSGGTAALGCLVKDYFPEPVTVSWNS | FGTRATLTISGVEAGD |
| | TVSPGGTVTLTCGSSTGAVTTGHYANWVQQK | GALTSGVHTFPAVLQSSGLYSLSSVVTVPSSSLGT | EADYYCHMWDSRSGFS |
| | PGQAPRGLIGGTNKRAPWTPARFSGSLLGGK | QTYICNVNHKPSNTKVDKKVEPKSCDKTHTCPPCP | WSFGGATRLTVLGQPK |
| | AALTLSGAQPEDEAEYYCALWYSNLWVFGGG | APEAAGGPSVFLFPPKPKDTLYITREPEVTCVVVD | AAPSVTLFPPSSEELQ |
| | TKLTVLEPKSSDKTHTCPPCPAPEAAGGPSV | VSHEDPEVKFNWYVDGVEVHNAKTKPREEQYNSTY | ANKATLVCLISDFYPG |
| | FLFPPKPKDTLYITREPEVTCVVVDVSHEDP | RVVSVLTVLHQDWLNGKEYKCKVSNKALPASIEKT | AVTVAWKADSSPVKAG |
| | EVKFNWYVDGVEVHNAKTKPREEQYNSTYRV | ISKAKGQPREPQVYTLPPSREEMTKNQVSLSCAVK | VETTTPSKQSNNKYAA |
| | VSVLTVLHQDWLNGKEYKCKVSNKALPASIE | GFYPSDIAVEWESNGQPENNYKTTPPVLDSDGSFF | SSYLSLTPEQWKSHRS |
| | KTISKAKGQPREPQVYTLPPSREEMTKNQVS | LVSKLTVDKSRWQQGNVFSCSVMHEALHNHYTQKS | YSCQVTHEGSTVEKTV |
| | LWCLVKGFYPSDIAVEWESNGQPENNYKTTP | LSLSPGK | APTECS |
| | PVLDSDGSFFLYSKLTVDKSRWQQGNVFSCS | | |
| | VMHEALHNHYTQKSLSLSPGK | | |
| 297 | SEQ ID NO: 880 | SEQ ID NO: 866 | SEQ ID NO: 863 |
| 10-1074 | EVQLVESGGGLVQPGGSLRLSCAASGFTFNT | QVQLQESGPGLVKPSETLSVTCSVSGDSMNNYYWT | SYVRPLSVALGETARI |
| AAS + SAV/ | YAMNWVRQAPGKGLEWVGRIRSKYNNYATYY | WIRQSPGKGLEWIGYISDRESATYNPSLNSRVVIS | SCGRQALGSRAVQWYQ |
| huSP34.34.3scFv | AASVKGRFTISRDDSKNSLYLQMNSLKTEDT | RDTSKNQLSLKLNSVTPADTAVYYCATARRGQRIY | HRPGQAPILLIYNNQD |
| AAS + W | AMYYCVRHGNFGHSYVSWFAYWGQGTLVTVS | GVVSFGEFFYYYSMDVWGKGTTVIVSSASTKGPSV | RPSGIPERFSGTPDIN |
| | SGGGGSGGGGSGGGGSGGGGSQAVVTQEPSL | FPLAPSSKSTSGGTAALGCLVKDYFPEPVTVSWNS | FGTRATLTISGVEAGD |
| | TVSPGGTVTLTCGSSTGAVTTGHYANWVQQK | GALTSGVHTFPAVLQSSGLYSLSSVVTVPSSSLGT | EADYYCHMWDSRSGFS |
| | PGQAPRGLIGGTNKRAPWTPARFSGSLLGGK | QTYICNVNHKPSNTKVDKKVEPKSCDKTHTCPPCP | WSFGGATRLTVLGQPK |
| | AALTLSGAQPEDEAEYYCALWYSNLWVFGGG | APEAAGGPSVFLFPPKPKDTLMISRTPEVTCVVVD | AAPSVTLFPPSSEELQ |
| | TKLTVLEPKSSDKTHTCPPCPAPEAAGGPSV | VSHEDPEVKFNWYVDGVEVHNAKTKPREEQYNSTY | ANKATLVCLISDFYPG |
| | FLFPPKPKDTLMISRTPEVICVVVDVSHEDP | RVVSVLTVLHQDWLNGKEYKCKVSNKALPASIEKT | AVTVAWKADSSPVKAG |
| | EVKFNWYVDGVEVHNAKTKPREEQYNSTYRV | ISKAKGQPREPQVYTLPPSREEMTKNQVSLSCAVK | VETTTPSKQSNNKYAA |
| | VSVLTVLHQDWLNGKEYKCKVSNKALPASIE | GFYPSDIAVEWESNGQPENNYKTTPPVLDSDGSFF | SSYLSLTPEQWKSHRS |
| | KTISKAKGQPREPQVYTLPPSREEMTKNQVS | LVSKLTVDKSRWQQGNVFSCSVMHEALHNHYTQKS | YSCQVTHEGSTVEKTV |
| | LWCLVKGFYPSDIAVEWESNGQPENNYKTTP | LSLSPGK | APTECS |
| | PVLDSDGSFFLYSKLTVDKSRWQQGNVFSCS | | |
| | VMHEALHNHYTQKSLSLSPGK | | |
| 298 | SEQ ID NO: 881 | SEQ ID NO: 882 | SEQ ID NO: 883 |
| PGT-134 | EVQLVESGGGLVQPGGSLRLSCAASGFTFNT | QVHLQESGPGLVTPSETLSLTCTVSNGSVSGRFWS | SLNPLSLAPGATAKIP |
| AAS + SAV + | YAMNWVRQAPGKGLEWVGRIRSKYNNYATYY | WIRQSPGRGLEWIGYFSDTDRSEYNPSLRSRLTLS | CGERSRGSRAVQWYQQ |
| YTE/ | ADSVKGRFTISRDDSKNSLYLQMNSLRTEDT | VDRSKNQLSLKLKSVTAADSATYYCARAQQGKRIY | KPGQAPTLIIYNNQDR |
| huSP34.3.13scFv | AVYYCVRHGNFGHSYVSWFAYWGQGTLVTVS | GIVSFGELFYYYYMDAWGKGTPVTVSSASTKGPSV | PAGVSERFSGNPDVAI |
| AAS + W + YTE | SGGGGSGGGGSGGGGSGGGGSQAVVTQEPSL | FPLAPSSKSTSGGTAALGCLVKDYFPEPVTVSWNS | GVTATLTISRVEVGDE |
| | TVSPGGTVTLTCGSSTGAVTTGHYANWVQQK | GALTSGVHTFPAVLQSSGLYSLSSVVTVPSSSLGT | GDYYCHYWDSRSPISW |
| | PGQAPRGLIGGTSNRAPGVPARFSGSLLGGK | QTYICNVNHKPSNTKVDKKVEPKSCDKTHTCPPCP | IFAGGTQLTVLGQPKA |
| | AALTISGAQPEDEAEYYCALWYSNRWVFGGG | APEAAGGPSVFLFPPKPKDTLYITREPEVTCVVVD | APSVTLFPPSSEELQA |
| | TKLTVLEPKSSDKTHTCPPCPAPEAAGGPSV | VSHEDPEVKFNWYVDGVEVHNAKTKPREEQYNSTY | NKATLVCLISDFYPGA |
| | FLFPPKPKDTLYITREPEVTCVVVDVSHEDP | RVVSVLTVLHQDWLNGKEYKCKVSNKALPASIEKT | VTVAWKADSSPVKAGV |
| | EVKFNWYVDGVEVHNAKTKPREEQYNSTYRV | ISKAKGQPREPQVYTLPPSREEMTKNQVSLSCAVK | ETTTPSKQSNNKYAAS |
| | VSVLTVLHQDWLNGKEYKCKVSNKALPASIE | GFYPSDIAVEWESNGQPENNYKTTPPVLDSDGSFF | SYLSLTPEQWKSHRSY |
| | KTISKAKGQPREPQVYTLPPSREEMTKNQVS | LVSKLTVDKSRWQQGNVFSCSVMHEALHNHYTQKS | SCQVTHEGSTVEKTVA |
| | LWCLVKGFYPSDIAVEWESNGQPENNYKTTP | LSLSPGK | PTECS |
| | PVLDSDGSFFLYSKLTVDKSRWQQGNVFSCS | | |
| | VMHEALHNHYTQKSLSLSPGK | | |
| 299 | SEQ ID NO: 881 | SEQ ID NO: 884 | SEQ ID NO: 883 |
| PGT-134 | EVQLVESGGGLVQPGGSLRLSCAASGFTFNT | QVHLQESGPGLVTPSETLSLTCTVSNGSVSGRFWS | SLNPLSLAPGATAKIP |
| AAS + SAV + | YAMNWVRQAPGKGLEWVGRIRSKYNNYATYY | WIRQSPGRGLEWIGYFSDTDRSEYNPSLRSRLTLS | CGERSRGSRAVQWYQQ |
| R/ | ADSVKGRFTISRDDSKNSLYLQMNSLRTEDT | VDRSKNQLSLKLKSVTAADSATYYCARAQQGKRIY | KPGQAPTLIIYNNQDR |
| huSP34.3.13scFv | AVYYCVRHGNFGHSYVSWFAYWGQGTLVTVS | GIVSFGELFYYYYMDAWGKGTPVTVSSASTKGPSV | PAGVSERFSGNPDVAI |
| AAS + W + YTE | SGGGGSGGGGSGGGGSGGGGSQAVVTQEPSL | FPLAPSSKSTSGGTAALGCLVKDYFPEPVTVSWNS | GVTATLTISRVEVGDE |
| | TVSPGGTVTLTCGSSTGAVTTGHYANWVQQK | GALTSGVHTFPAVLQSSGLYSLSSVVTVPSSSLGT | GDYYCHYWDSRSPISW |
| | PGQAPRGLIGGTSNRAPGVPARFSGSLLGGK | QTYICNVNHKPSNTKVDKKVEPKSCDKTHTCPPCP | IFAGGTQLTVLGQPKA |
| | AALTISGAQPEDEAEYYCALWYSNRWVFGGG | APEAAGGPSVFLFPPKPKDTLMISRTPEVTCVVVD | APSVTLFPPSSEELQA |
| | TKLTVLEPKSSDKTHTCPPCPAPEAAGGPSV | VSHEDPEVKFNWYVDGVEVHNAKTKPREEQYNSTY | NKATLVCLISDFYPGA |
| | FLFPPKPKDTLYITREPEVTCVVVDVSHEDP | RVVSVLTVLHQDWLNGKEYKCKVSNKALPASIEKT | VTVAWKADSSPVKAGV |
| | EVKFNWYVDGVEVHNAKTKPREEQYNSTYRV | ISKAKGQPREPQVYTLPPSREEMTKNQVSLSCAVK | ETTTPSKQSNNKYAAS |
| | VSVLTVLHQDWLNGKEYKCKVSNKALPASIE | GFYPSDIAVEWESNGQPENNYKTTPPVLDSDGSFF | SYLSLTPEQWKSHRSY |
| | KTISKAKGQPREPQVYTLPPSREEMTKNQVS | LVSKLTVDKSRWQQGNVFSCSVMHEALHNRYTQKS | SCQVTHEGSTVEKTVA |
| | LWCLVKGFYPSDIAVEWESNGQPENNYKTTP | LSLSPGK | PTECS |
| | PVLDSDGSFFLYSKLTVDKSRWQQGNVFSCS | | |
| | VMHEALHNHYTQKSLSLSPGK | | |
| 300 | SEQ ID NO: 885 | SEQ ID NO: 884 | SEQ ID NO: 883 |
| PGT-134 | EVQLVESGGGLVQPGGSLRLSCAASGFTFNT | QVHLQESGPGLVTPSETLSLTCTVSNGSVSGRFWS | SLNPLSLAPGATAKIP |
| AAS + SAV + | YAMNWVRQAPGKGLEWVGRIRSKYNNYATYY | WIRQSPGRGLEWIGYFSDTDRSEYNPSLRSRLTLS | CGERSRGSRAVQWYQQ |
| R/ | ADSVKGRFTISRDDSKNSLYLQMNSLRTEDT | VDRSKNQLSLKLKSVTAADSATYYCARAQQGKRIY | KPGQAPTLIIYNNQDR |
| huSP34.3.13scFv | AVYYCVRHGNFGHSYVSWFAYWGQGTLVTVS | GIVSFGELFYYYYMDAWGKGTPVTVSSASTKGPSV | PAGVSERFSGNPDVAI |
| AAS + W | SGGGGSGGGGSGGGGSGGGGSQAVVTQEPSL | FPLAPSSKSTSGGTAALGCLVKDYFPEPVTVSWNS | GVTATLTISRVEVGDE |
| | TVSPGGTVTLTCGSSTGAVTTGHYANWVQQK | GALTSGVHTFPAVLQSSGLYSLSSVVTVPSSSLGT | GDYYCHYWDSRSPISW |
| | PGQAPRGLIGGTSNRAPGVPARFSGSLLGGK | QTYICNVNHKPSNTKVDKKVEPKSCDKTHTCPPCP | IFAGGTQLTVLGQPKA |
| | AALTISGAQPEDEAEYYCALWYSNRWVFGGG | APEAAGGPSVFLFPPKPKDTLMISRTPEVTCVVVD | APSVTLFPPSSEELQA |
| | TKLTVLEPKSSDKTHTCPPCPAPEAAGGPSV | VSHEDPEVKFNWYVDGVEVHNAKTKPREEQYNSTY | NKATLVCLISDFYPGA |
| | FLFPPKPKDTLMISRTPEVICVVVDVSHEDP | RVVSVLTVLHQDWLNGKEYKCKVSNKALPASIEKT | VTVAWKADSSPVKAGV |
| | EVKFNWYVDGVEVHNAKTKPREEQYNSTYRV | ISKAKGQPREPQVYTLPPSREEMTKNQVSLSCAVK | ETTTPSKQSNNKYAAS |
| | VSVLTVLHQDWLNGKEYKCKVSNKALPASIE | GFYPSDIAVEWESNGQPENNYKTTPPVLDSDGSFF | SYLSLTPEQWKSHRSY |
| | KTISKAKGQPREPQVYTLPPSREEMTKNQVS | LVSKLTVDKSRWQQGNVFSCSVMHEALHNRYTQKS | SCQVTHEGSTVEKTVA |
| | LWCLVKGFYPSDIAVEWESNGQPENNYKTTP | LSLSPGK | PTECS |
| | PVLDSDGSFFLYSKLTVDKSRWQQGNVFSCS | | |
| | VMHEALHNHYTQKSLSLSPGK | | |
| 301 | SEQ ID NO: 885 | SEQ ID NO: 886 | SEQ ID NO: 883 |
| PGT-134 | EVQLVESGGGLVQPGGSLRLSCAASGFTFNT | QVHLQESGPGLVTPSETLSLTCTVSNGSVSGRFWS | SLNPLSLAPGATAKIP |
| AAS + SAV/ | YAMNWVRQAPGKGLEWVGRIRSKYNNYATYY | WIRQSPGRGLEWIGYFSDTDRSEYNPSLRSRLTLS | CGERSRGSRAVQWYQQ |
| huSP34.3.13scFv | ADSVKGRFTISRDDSKNSLYLQMNSLRTEDT | VDRSKNQLSLKLKSVTAADSATYYCARAQQGKRIY | KPGQAPTLIIYNNQDR |
| AAS + W | AVYYCVRHGNFGHSYVSWFAYWGQGTLVTVS | GIVSFGELFYYYYMDAWGKGTPVTVSSASTKGPSV | PAGVSERFSGNPDVAI |
| | SGGGGSGGGGSGGGGSGGGGSQAVVTQEPSL | FPLAPSSKSTSGGTAALGCLVKDYFPEPVTVSWNS | GVTATLTISRVEVGDE |
| | TVSPGGTVTLTCGSSTGAVTTGHYANWVQQK | GALTSGVHTFPAVLQSSGLYSLSSVVTVPSSSLGT | GDYYCHYWDSRSPISW |
| | PGQAPRGLIGGTSNRAPGVPARFSGSLLGGK | QTYICNVNHKPSNTKVDKKVEPKSCDKTHTCPPCP | IFAGGTQLTVLGQPKA |
| | AALTISGAQPEDEAEYYCALWYSNRWVFGGG | APEAAGGPSVFLFPPKPKDTLMISRTPEVTCVVVD | APSVTLFPPSSEELQA |
| | TKLTVLEPKSSDKTHTCPPCPAPEAAGGPSV | VSHEDPEVKFNWYVDGVEVHNAKTKPREEQYNSTY | NKATLVCLISDFYPGA |
| | FLFPPKPKDTLMISRTPEVICVVVDVSHEDP | RVVSVLTVLHQDWLNGKEYKCKVSNKALPASIEKT | VTVAWKADSSPVKAGV |
| | EVKFNWYVDGVEVHNAKTKPREEQYNSTYRV | ISKAKGQPREPQVYTLPPSREEMTKNQVSLSCAVK | ETTTPSKQSNNKYAAS |
| | VSVLTVLHQDWLNGKEYKCKVSNKALPASIE | GFYPSDIAVEWESNGQPENNYKTTPPVLDSDGSFF | SYLSLTPEQWKSHRSY |
| | KTISKAKGQPREPQVYTLPPSREEMTKNQVS | LVSKLTVDKSRWQQGNVFSCSVMHEALHNHYTQKS | SCQVTHEGSTVEKTVA |
| | LWCLVKGFYPSDIAVEWESNGQPENNYKTTP | LSLSPGK | PTECS |
| | PVLDSDGSFFLYSKLTVDKSRWQQGNVFSCS | | |
| | VMHEALHNHYTQKSLSLSPGK | | |
| 302 | SEQ ID NO: 887 | SEQ ID NO: 888 | SEQ ID NO: 883 |
| PGT-134 | EVQLVESGGGLVQPGGSLRLSCAASGFTFNT | QVHLQESGPGLVTPSETLSLTCTVSNGSVSGRFWS | SLNPLSLAPGATAKIP |
| AAS + W/hu | YAMNWVRQAPGKGLEWVGRIRSKYNNYATYY | WIRQSPGRGLEWIGYFSDTDRSEYNPSLRSRLTLS | CGERSRGSRAVQWYQQ |
| SP34.3.13scFv | ADSVKGRFTISRDDSKNSLYLQMNSLRTEDT | VDRSKNQLSLKLKSVTAADSATYYCARAQQGKRIY | KPGQAPTLIIYNNQDR |
| AAS + SAV + | AVYYCVRHGNFGHSYVSWFAYWGQGTLVTVS | GIVSFGELFYYYYMDAWGKGTPVTVSSASTKGPSV | PAGVSERFSGNPDVAI |
| R | SGGGGSGGGGSGGGGSGGGGSQAVVTQEPSL | FPLAPSSKSTSGGTAALGCLVKDYFPEPVTVSWNS | GVTATLTISRVEVGDE |
| | TVSPGGTVTLTCGSSTGAVTTGHYANWVQQK | GALTSGVHTFPAVLQSSGLYSLSSVVTVPSSSLGT | GDYYCHYWDSRSPISW |
| | PGQAPRGLIGGTSNRAPGVPARFSGSLLGGK | QTYICNVNHKPSNTKVDKKVEPKSCDKTHTCPPCP | IFAGGTQLTVLGQPKA |
| | AALTISGAQPEDEAEYYCALWYSNRWVFGGG | APEAAGGPSVFLFPPKPKDTLMISRTPEVTCVVVD | APSVTLFPPSSEELQA |
| | TKLTVLEPKSSDKTHTCPPCPAPEAAGGPSV | VSHEDPEVKFNWYVDGVEVHNAKTKPREEQYNSTY | NKATLVCLISDFYPGA |
| | FLFPPKPKDTLMISRTPEVICVVVDVSHEDP | RVVSVLTVLHQDWLNGKEYKCKVSNKALPASIEKT | VTVAWKADSSPVKAGV |
| | EVKFNWYVDGVEVHNAKTKPREEQYNSTYRV | ISKAKGQPREPQVYTLPPSREEMTKNQVSLWCLVK | ETTTPSKQSNNKYAAS |
| | VSVLTVLHQDWLNGKEYKCKVSNKALPASIE | GFYPSDIAVEWESNGQPENNYKTTPPVLDSDGSFF | SYLSLTPEQWKSHRSY |
| | KTISKAKGQPREPQVYTLPPSREEMTKNQVS | LYSKLTVDKSRWQQGNVFSCSVMHEALHNHYTQKS | SCQVTHEGSTVEKTVA |
| | LSCAVKGFYPSDIAVEWESNGQPENNYKTTP | LSLSPGK | PTECS |
| | PVLDSDGSFFLVSKLTVDKSRWQQGNVFSCS | | |
| | VMHEALHNRYTQKSLSLSPGK | | |
| 303 | SEQ ID NO: 889 | SEQ ID NO: 882 | SEQ ID NO: 883 |
| PGT-134 | EVQLVESGGGLVQPGGSLRLSCAASGFTFNT | QVHLQESGPGLVTPSETLSLTCTVSNGSVSGRFWS | SLNPLSLAPGATAKIP |
| AAS + SAV + | YAMNWVRQAPGKGLEWVGRIRSKYNNYATYY | WIRQSPGRGLEWIGYFSDTDRSEYNPSLRSRLTLS | CGERSRGSRAVQWYQQ |
| YTE/ | ADSVKSRFTISRDDSKNSLYLEMNSLRTEDT | VDRSKNQLSLKLKSVTAADSATYYCARAQQGKRIY | KPGQAPTLIIYNNQDR |
| huSP34.39.13 | AVYYCVRHGNFGHSYVSWFAYWGQGTLVTVS | GIVSFGELFYYYYMDAWGKGTPVTVSSASTKGPSV | PAGVSERFSGNPDVAI |
| scFv | SGGGGSGGGGSGGGGSGGGGSQAVVTQEPSL | FPLAPSSKSTSGGTAALGCLVKDYFPEPVTVSWNS | GVTATLTISRVEVGDE |
| AAS + W + YTE | TVSPGGTVTLTCGSSTGAVTTGHYANWVQQK | GALTSGVHTFPAVLQSSGLYSLSSVVTVPSSSLGT | GDYYCHYWDSRSPISW |
| | PGQAPRGLIGGTSNRAPGVPARFSGSLLGGK | QTYICNVNHKPSNTKVDKKVEPKSCDKTHTCPPCP | IFAGGTQLTVLGQPKA |
| | AALTISGAQPEDEAEYYCALWYSNRWVFGGG | APEAAGGPSVFLFPPKPKDTLYITREPEVTCVVVD | APSVTLFPPSSEELQA |
| | TKLTVLEPKSSDKTHTCPPCPAPEAAGGPSV | VSHEDPEVKFNWYVDGVEVHNAKTKPREEQYNSTY | NKATLVCLISDFYPGA |
| | FLFPPKPKDTLYITREPEVTCVVVDVSHEDP | RVVSVLTVLHQDWLNGKEYKCKVSNKALPASIEKT | VTVAWKADSSPVKAGV |
| | EVKFNWYVDGVEVHNAKTKPREEQYNSTYRV | ISKAKGQPREPQVYTLPPSREEMTKNQVSLSCAVK | ETTTPSKQSNNKYAAS |
| | VSVLTVLHQDWLNGKEYKCKVSNKALPASIE | GFYPSDIAVEWESNGQPENNYKTTPPVLDSDGSFF | SYLSLTPEQWKSHRSY |
| | KTISKAKGQPREPQVYTLPPSREEMTKNQVS | LVSKLTVDKSRWQQGNVFSCSVMHEALHNHYTQKS | SCQVTHEGSTVEKTVA |
| | LWCLVKGFYPSDIAVEWESNGQPENNYKTTP | LSLSPGK | PTECS |
| | PVLDSDGSFFLYSKLTVDKSRWQQGNVFSCS | | |
| | VMHEALHNHYTQKSLSLSPGK | | |
| 304 | SEQ ID NO: 889 | SEQ ID NO: 884 | SEQ ID NO: 883 |
| PGT-134 | EVQLVESGGGLVQPGGSLRLSCAASGFTFNT | QVHLQESGPGLVTPSETLSLTCTVSNGSVSGRFWS | SLNPLSLAPGATAKIP |
| AAS + SAV + | YAMNWVRQAPGKGLEWVGRIRSKYNNYATYY | WIRQSPGRGLEWIGYFSDTDRSEYNPSLRSRLTLS | CGERSRGSRAVQWYQQ |
| R/ | ADSVKSRFTISRDDSKNSLYLEMNSLRTEDT | VDRSKNQLSLKLKSVTAADSATYYCARAQQGKRIY | KPGQAPTLIIYNNQDR |
| huSP34.39.13scFv | AVYYCVRHGNFGHSYVSWFAYWGQGTLVTVS | GIVSFGELFYYYYMDAWGKGTPVTVSSASTKGPSV | PAGVSERFSGNPDVAI |
| AAS + W + YTE | SGGGGSGGGGSGGGGSGGGGSQAVVTQEPSL | FPLAPSSKSTSGGTAALGCLVKDYFPEPVTVSWNS | GVTATLTISRVEVGDE |
| | TVSPGGTVTLTCGSSTGAVTTGHYANWVQQK | GALTSGVHTFPAVLQSSGLYSLSSVVTVPSSSLGT | GDYYCHYWDSRSPISW |
| | PGQAPRGLIGGTSNRAPGVPARFSGSLLGGK | QTYICNVNHKPSNTKVDKKVEPKSCDKTHTCPPCP | IFAGGTQLTVLGQPKA |
| | AALTISGAQPEDEAEYYCALWYSNRWVFGGG | APEAAGGPSVFLFPPKPKDTLMISRTPEVTCVVVD | APSVTLFPPSSEELQA |
| | TKLTVLEPKSSDKTHTCPPCPAPEAAGGPSV | VSHEDPEVKFNWYVDGVEVHNAKTKPREEQYNSTY | NKATLVCLISDFYPGA |
| | FLFPPKPKDTLYITREPEVTCVVVDVSHEDP | RVVSVLTVLHQDWLNGKEYKCKVSNKALPASIEKT | VTVAWKADSSPVKAGV |
| | EVKFNWYVDGVEVHNAKTKPREEQYNSTYRV | ISKAKGQPREPQVYTLPPSREEMTKNQVSLSCAVK | ETTTPSKQSNNKYAAS |
| | VSVLTVLHQDWLNGKEYKCKVSNKALPASIE | GFYPSDIAVEWESNGQPENNYKTTPPVLDSDGSFF | SYLSLTPEQWKSHRSY |
| | KTISKAKGQPREPQVYTLPPSREEMTKNQVS | LVSKLTVDKSRWQQGNVFSCSVMHEALHNRYTQKS | SCQVTHEGSTVEKTVA |
| | LWCLVKGFYPSDIAVEWESNGQPENNYKTTP | LSLSPGK | PTECS |
| | PVLDSDGSFFLYSKLTVDKSRWQQGNVFSCS | | |
| | VMHEALHNHYTQKSLSLSPGK | | |
| 305 | SEQ ID NO: 890 | SEQ ID NO: 884 | SEQ ID NO: 883 |
| PGT-134 | EVQLVESGGGLVQPGGSLRLSCAASGFTFNT | QVHLQESGPGLVTPSETLSLTCTVSNGSVSGRFWS | SLNPLSLAPGATAKIP |
| AAS + SAV + | YAMNWVRQAPGKGLEWVGRIRSKYNNYATYY | WIRQSPGRGLEWIGYFSDTDRSEYNPSLRSRLTLS | CGERSRGSRAVQWYQQ |
| R/ | ADSVKSRFTISRDDSKNSLYLEMNSLRTEDT | VDRSKNQLSLKLKSVTAADSATYYCARAQQGKRIY | KPGQAPTLIIYNNQDR |
| huSP34.39.13scFv | AVYYCVRHGNFGHSYVSWFAYWGQGTLVTVS | GIVSFGELFYYYYMDAWGKGTPVTVSSASTKGPSV | PAGVSERFSGNPDVAI |
| AAS + W | SGGGGSGGGGSGGGGSGGGGSQAVVTQEPSL | FPLAPSSKSTSGGTAALGCLVKDYFPEPVTVSWNS | GVTATLTISRVEVGDE |
| | TVSPGGTVTLTCGSSTGAVTTGHYANWVQQK | GALTSGVHTFPAVLQSSGLYSLSSVVTVPSSSLGT | GDYYCHYWDSRSPISW |
| | PGQAPRGLIGGTSNRAPGVPARFSGSLLGGK | QTYICNVNHKPSNTKVDKKVEPKSCDKTHTCPPCP | IFAGGTQLTVLGQPKA |
| | AALTISGAQPEDEAEYYCALWYSNRWVFGGG | APEAAGGPSVFLFPPKPKDTLMISRTPEVTCVVVD | APSVTLFPPSSEELQA |
| | TKLTVLEPKSSDKTHTCPPCPAPEAAGGPSV | VSHEDPEVKFNWYVDGVEVHNAKTKPREEQYNSTY | NKATLVCLISDFYPGA |
| | FLFPPKPKDTLMISRTPEVICVVVDVSHEDP | RVVSVLTVLHQDWLNGKEYKCKVSNKALPASIEKT | VTVAWKADSSPVKAGV |
| | EVKFNWYVDGVEVHNAKTKPREEQYNSTYRV | ISKAKGQPREPQVYTLPPSREEMTKNQVSLSCAVK | ETTTPSKQSNNKYAAS |
| | VSVLTVLHQDWLNGKEYKCKVSNKALPASIE | GFYPSDIAVEWESNGQPENNYKTTPPVLDSDGSFF | SYLSLTPEQWKSHRSY |
| | KTISKAKGQPREPQVYTLPPSREEMTKNQVS | LVSKLTVDKSRWQQGNVFSCSVMHEALHNRYTQKS | SCQVTHEGSTVEKTVA |
| | LWCLVKGFYPSDIAVEWESNGQPENNYKTTP | LSLSPGK | PTECS |
| | PVLDSDGSFFLYSKLTVDKSRWQQGNVFSCS | | |
| | VMHEALHNHYTQKSLSLSPGK | | |
| 306 | SEQ ID NO: 890 | SEQ ID NO: 886 | SEQ ID NO: 883 |
| PGT-134 | EVQLVESGGGLVQPGGSLRLSCAASGFTFNT | QVHLQESGPGLVTPSETLSLTCTVSNGSVSGRFWS | SLNPLSLAPGATAKIP |
| AAS + SAV/ | YAMNWVRQAPGKGLEWVGRIRSKYNNYATYY | WIRQSPGRGLEWIGYFSDTDRSEYNPSLRSRLTLS | CGERSRGSRAVQWYQQ |
| huSP34.39.13scFv | ADSVKSRFTISRDDSKNSLYLEMNSLRTEDT | VDRSKNQLSLKLKSVTAADSATYYCARAQQGKRIY | KPGQAPTLIIYNNQDR |
| AAS + W | AVYYCVRHGNFGHSYVSWFAYWGQGTLVTVS | GIVSFGELFYYYYMDAWGKGTPVTVSSASTKGPSV | PAGVSERFSGNPDVAI |
| | SGGGGSGGGGSGGGGSGGGGSQAVVTQEPSL | FPLAPSSKSTSGGTAALGCLVKDYFPEPVTVSWNS | GVTATLTISRVEVGDE |
| | TVSPGGTVTLTCGSSTGAVTTGHYANWVQQK | GALTSGVHTFPAVLQSSGLYSLSSVVTVPSSSLGT | GDYYCHYWDSRSPISW |
| | PGQAPRGLIGGTSNRAPGVPARFSGSLLGGK | QTYICNVNHKPSNTKVDKKVEPKSCDKTHTCPPCP | IFAGGTQLTVLGQPKA |
| | AALTISGAQPEDEAEYYCALWYSNRWVFGGG | APEAAGGPSVFLFPPKPKDTLMISRTPEVTCVVVD | APSVTLFPPSSEELQA |
| | TKLTVLEPKSSDKTHTCPPCPAPEAAGGPSV | VSHEDPEVKFNWYVDGVEVHNAKTKPREEQYNSTY | NKATLVCLISDFYPGA |
| | FLFPPKPKDTLMISRTPEVICVVVDVSHEDP | RVVSVLTVLHQDWLNGKEYKCKVSNKALPASIEKT | VTVAWKADSSPVKAGV |
| | EVKFNWYVDGVEVHNAKTKPREEQYNSTYRV | ISKAKGQPREPQVYTLPPSREEMTKNQVSLSCAVK | ETTTPSKQSNNKYAAS |
| | VSVLTVLHQDWLNGKEYKCKVSNKALPASIE | GFYPSDIAVEWESNGQPENNYKTTPPVLDSDGSFF | SYLSLTPEQWKSHRSY |
| | KTISKAKGQPREPQVYTLPPSREEMTKNQVS | LVSKLTVDKSRWQQGNVFSCSVMHEALHNHYTQKS | SCQVTHEGSTVEKTVA |
| | LWCLVKGFYPSDIAVEWESNGQPENNYKTTP | LSLSPGK | PTECS |
| | PVLDSDGSFFLYSKLTVDKSRWQQGNVFSCS | | |
| | VMHEALHNHYTQKSLSLSPGK | | |
| 307 | SEQ ID NO: 891 | SEQ ID NO: 892 | SEQ ID NO: 883 |
| PGT-134 | EVQLVESGGGLVQPGGSLRLSCAASGFTFNT | QVHLQESGPGLVTPSETLSLTCTVSNGSVSGRFWS | SLNPLSLAPGATAKIP |
| AAS + W + YTE/ | YAMNWVRQAPGKGLEWVGRIRSKYNNYATYY | WIRQSPGRGLEWIGYFSDTDRSEYNPSLRSRLTLS | CGERSRGSRAVQWYQQ |
| huSP34.39.13scFv | ADSVKSRFTISRDDSKNSLYLEMNSLRTEDT | VDRSKNQLSLKLKSVTAADSATYYCARAQQGKRIY | KPGQAPTLIIYNNQDR |
| AAS + SAV + | AVYYCVRHGNFGHSYVSWFAYWGQGTLVTVS | GIVSFGELFYYYYMDAWGKGTPVTVSSASTKGPSV | PAGVSERFSGNPDVAI |
| R | SGGGGSGGGGSGGGGSGGGGSQAVVTQEPSL | FPLAPSSKSTSGGTAALGCLVKDYFPEPVTVSWNS | GVTATLTISRVEVGDE |
| | TVSPGGTVTLTCGSSTGAVTTGHYANWVQQK | GALTSGVHTFPAVLQSSGLYSLSSVVTVPSSSLGT | GDYYCHYWDSRSPISW |
| | PGQAPRGLIGGTSNRAPGVPARFSGSLLGGK | QTYICNVNHKPSNTKVDKKVEPKSCDKTHTCPPCP | IFAGGTQLTVLGQPKA |
| | AALTISGAQPEDEAEYYCALWYSNRWVFGGG | APEAAGGPSVFLFPPKPKDTLYITREPEVTCVVVD | APSVTLFPPSSEELQA |
| | TKLTVLEPKSSDKTHTCPPCPAPEAAGGPSV | VSHEDPEVKFNWYVDGVEVHNAKTKPREEQYNSTY | NKATLVCLISDFYPGA |
| | FLFPPKPKDTLMISRTPEVICVVVDVSHEDP | RVVSVLTVLHQDWLNGKEYKCKVSNKALPASIEKT | VTVAWKADSSPVKAGV |
| | EVKFNWYVDGVEVHNAKTKPREEQYNSTYRV | ISKAKGQPREPQVYTLPPSREEMTKNQVSLWCLVK | ETTTPSKQSNNKYAAS |
| | VSVLTVLHQDWLNGKEYKCKVSNKALPASIE | GFYPSDIAVEWESNGQPENNYKTTPPVLDSDGSFF | SYLSLTPEQWKSHRSY |
| | KTISKAKGQPREPQVYTLPPSREEMTKNQVS | LYSKLTVDKSRWQQGNVFSCSVMHEALHNHYTQKS | SCQVTHEGSTVEKTVA |
| | LSCAVKGFYPSDIAVEWESNGQPENNYKTTP | LSLSPGK | PTECS |
| | PVLDSDGSFFLVSKLTVDKSRWQQGNVFSCS | | |
| | VMHEALHNRYTQKSLSLSPGK | | |
| 308 | SEQ ID NO: 891 | SEQ ID NO: 888 | SEQ ID NO: 883 |
| PGT-134 | EVQLVESGGGLVQPGGSLRLSCAASGFTFNT | QVHLQESGPGLVTPSETLSLTCTVSNGSVSGRFWS | SLNPLSLAPGATAKIP |
| AAS + W/ | YAMNWVRQAPGKGLEWVGRIRSKYNNYATYY | WIRQSPGRGLEWIGYFSDTDRSEYNPSLRSRLTLS | CGERSRGSRAVQWYQQ |
| huSP34.39.13scFv | ADSVKSRFTISRDDSKNSLYLEMNSLRTEDT | VDRSKNQLSLKLKSVTAADSATYYCARAQQGKRIY | KPGQAPTLIIYNNQDR |
| AAS + SAV + | AVYYCVRHGNFGHSYVSWFAYWGQGTLVTVS | GIVSFGELFYYYYMDAWGKGTPVTVSSASTKGPSV | PAGVSERFSGNPDVAI |
| R | SGGGGSGGGGSGGGGSGGGGSQAVVTQEPSL | FPLAPSSKSTSGGTAALGCLVKDYFPEPVTVSWNS | GVTATLTISRVEVGDE |
| | TVSPGGTVTLTCGSSTGAVTTGHYANWVQQK | GALTSGVHTFPAVLQSSGLYSLSSVVTVPSSSLGT | GDYYCHYWDSRSPISW |
| | PGQAPRGLIGGTSNRAPGVPARFSGSLLGGK | QTYICNVNHKPSNTKVDKKVEPKSCDKTHTCPPCP | IFAGGTQLTVLGQPKA |
| | AALTISGAQPEDEAEYYCALWYSNRWVFGGG | APEAAGGPSVFLFPPKPKDTLMISRTPEVTCVVVD | APSVTLFPPSSEELQA |
| | TKLTVLEPKSSDKTHTCPPCPAPEAAGGPSV | VSHEDPEVKFNWYVDGVEVHNAKTKPREEQYNSTY | NKATLVCLISDFYPGA |
| | FLFPPKPKDTLMISRTPEVICVVVDVSHEDP | RVVSVLTVLHQDWLNGKEYKCKVSNKALPASIEKT | VTVAWKADSSPVKAGV |
| | EVKFNWYVDGVEVHNAKTKPREEQYNSTYRV | ISKAKGQPREPQVYTLPPSREEMTKNQVSLWCLVK | ETTTPSKQSNNKYAAS |
| | VSVLTVLHQDWLNGKEYKCKVSNKALPASIE | GFYPSDIAVEWESNGQPENNYKTTPPVLDSDGSFF | SYLSLTPEQWKSHRSY |
| | KTISKAKGQPREPQVYTLPPSREEMTKNQVS | LYSKLTVDKSRWQQGNVFSCSVMHEALHNHYTQKS | SCQVTHEGSTVEKTVA |
| | LSCAVKGFYPSDIAVEWESNGQPENNYKTTP | LSLSPGK | PTECS |
| | PVLDSDGSFFLVSKLTVDKSRWQQGNVFSCS | | |
| | VMHEALHNRYTQKSLSLSPGK | | |
| 309 | SEQ ID NO: 893 | SEQ ID NO: 882 | SEQ ID NO: 883 |
| PGT-134 | EVQLVESGGGLVQPGGSLRLSCAASGFTFNT | QVHLQESGPGLVTPSETLSLTCTVSNGSVSGRFWS | SLNPLSLAPGATAKIP |
| AAS + SAV + | YAMNWVRQAPGKGLEWVGRIRSKYNNYATYY | WIRQSPGRGLEWIGYFSDTDRSEYNPSLRSRLTLS | CGERSRGSRAVQWYQQ |
| YTE/ | AASVKGRFTISRDDSKNSLYLQMNSLKTEDT | VDRSKNQLSLKLKSVTAADSATYYCARAQQGKRIY | KPGQAPTLIIYNNQDR |
| huSP34.1.3scFv | AMYYCVRHGNFGNSYVSWFAYWGQGTLVTVS | GIVSFGELFYYYYMDAWGKGTPVTVSSASTKGPSV | PAGVSERFSGNPDVAI |
| AAS + W + YTE | SGGGGSGGGGSGGGGSGGGGSQAVVTQEPSL | FPLAPSSKSTSGGTAALGCLVKDYFPEPVTVSWNS | GVTATLTISRVEVGDE |
| | TVSPGGTVTLTCGSSTGAVTTGHYANWVQQK | GALTSGVHTFPAVLQSSGLYSLSSVVTVPSSSLGT | GDYYCHYWDSRSPISW |
| | PGQAPRGLIGGTNKRAPWTPARFSGSLLGGK | QTYICNVNHKPSNTKVDKKVEPKSCDKTHTCPPCP | IFAGGTQLTVLGQPKA |
| | AALTLSGAQPEDEAEYYCALWYSNLWVFGGG | APEAAGGPSVFLFPPKPKDTLYITREPEVTCVVVD | APSVTLFPPSSEELQA |
| | TKLTVLEPKSSDKTHTCPPCPAPEAAGGPSV | VSHEDPEVKFNWYVDGVEVHNAKTKPREEQYNSTY | NKATLVCLISDFYPGA |
| | FLFPPKPKDTLYITREPEVTCVVVDVSHEDP | RVVSVLTVLHQDWLNGKEYKCKVSNKALPASIEKT | VTVAWKADSSPVKAGV |
| | EVKFNWYVDGVEVHNAKTKPREEQYNSTYRV | ISKAKGQPREPQVYTLPPSREEMTKNQVSLSCAVK | ETTTPSKQSNNKYAAS |
| | VSVLTVLHQDWLNGKEYKCKVSNKALPASIE | GFYPSDIAVEWESNGQPENNYKTTPPVLDSDGSFF | SYLSLTPEQWKSHRSY |
| | KTISKAKGQPREPQVYTLPPSREEMTKNQVS | LVSKLTVDKSRWQQGNVFSCSVMHEALHNHYTQKS | SCQVTHEGSTVEKTVA |
| | LWCLVKGFYPSDIAVEWESNGQPENNYKTTP | LSLSPGK | PTECS |
| | PVLDSDGSFFLYSKLTVDKSRWQQGNVFSCS | | |
| | VMHEALHNHYTQKSLSLSPGK | | |
| 310 | SEQ ID NO: 894 | SEQ ID NO: 886 | SEQ ID NO: 883 |
| PGT-134 | EVQLVESGGGLVQPGGSLRLSCAASGFTFNT | QVHLQESGPGLVTPSETLSLTCTVSNGSVSGRFWS | SLNPLSLAPGATAKIP |
| AAS + SAV/ | YAMNWVRQAPGKGLEWVGRIRSKYNNYATYY | WIRQSPGRGLEWIGYFSDTDRSEYNPSLRSRLTLS | CGERSRGSRAVQWYQQ |
| huSP34.1.3scFv | AASVKGRFTISRDDSKNSLYLQMNSLKTEDT | VDRSKNQLSLKLKSVTAADSATYYCARAQQGKRIY | KPGQAPTLIIYNNQDR |
| AAS + W | AMYYCVRHGNFGNSYVSWFAYWGQGTLVTVS | GIVSFGELFYYYYMDAWGKGTPVTVSSASTKGPSV | PAGVSERFSGNPDVAI |
| | SGGGGSGGGGSGGGGSGGGGSQAVVTQEPSL | FPLAPSSKSTSGGTAALGCLVKDYFPEPVTVSWNS | GVTATLTISRVEVGDE |
| | TVSPGGTVTLTCGSSTGAVTTGHYANWVQQK | GALTSGVHTFPAVLQSSGLYSLSSVVTVPSSSLGT | GDYYCHYWDSRSPISW |
| | PGQAPRGLIGGTNKRAPWTPARFSGSLLGGK | QTYICNVNHKPSNTKVDKKVEPKSCDKTHTCPPCP | IFAGGTQLTVLGQPKA |
| | AALTLSGAQPEDEAEYYCALWYSNLWVFGGG | APEAAGGPSVFLFPPKPKDTLMISRTPEVTCVVVD | APSVTLFPPSSEELQA |
| | TKLTVLEPKSSDKTHTCPPCPAPEAAGGPSV | VSHEDPEVKFNWYVDGVEVHNAKTKPREEQYNSTY | NKATLVCLISDFYPGA |
| | FLFPPKPKDTLMISRTPEVICVVVDVSHEDP | RVVSVLTVLHQDWLNGKEYKCKVSNKALPASIEKT | VTVAWKADSSPVKAGV |
| | EVKFNWYVDGVEVHNAKTKPREEQYNSTYRV | ISKAKGQPREPQVYTLPPSREEMTKNQVSLSCAVK | ETTTPSKQSNNKYAAS |
| | VSVLTVLHQDWLNGKEYKCKVSNKALPASIE | GFYPSDIAVEWESNGQPENNYKTTPPVLDSDGSFF | SYLSLTPEQWKSHRSY |
| | KTISKAKGQPREPQVYTLPPSREEMTKNQVS | LVSKLTVDKSRWQQGNVFSCSVMHEALHNHYTQKS | SCQVTHEGSTVEKTVA |
| | LWCLVKGFYPSDIAVEWESNGQPENNYKTTP | LSLSPGK | PTECS |
| | PVLDSDGSFFLYSKLTVDKSRWQQGNVFSCS | | |
| | VMHEALHNHYTQKSLSLSPGK | | |
| 311 | SEQ ID NO: 895 | SEQ ID NO: 892 | SEQ ID NO: 883 |
| PGT-134 | EVQLVESGGGLVQPGGSLRLSCAASGFTFNT | QVHLQESGPGLVTPSETLSLTCTVSNGSVSGRFWS | SLNPLSLAPGATAKIP |
| AAS + W + YTE/ | YAMNWVRQAPGKGLEWVGRIRSKYNNYATYY | WIRQSPGRGLEWIGYFSDTDRSEYNPSLRSRLTLS | CGERSRGSRAVQWYQQ |
| huSP34.1.3 | AASVKGRFTISRDDSKNSLYLQMNSLKTEDT | VDRSKNQLSLKLKSVTAADSATYYCARAQQGKRIY | KPGQAPTLIIYNNQDR |
| scFv | AMYYCVRHGNFGNSYVSWFAYWGQGTLVTVS | GIVSFGELFYYYYMDAWGKGTPVTVSSASTKGPSV | PAGVSERFSGNPDVAI |
| AAS + SAV + | SGGGGSGGGGSGGGGSGGGGSQAVVTQEPSL | FPLAPSSKSTSGGTAALGCLVKDYFPEPVTVSWNS | GVTATLTISRVEVGDE |
| R | TVSPGGTVTLTCGSSTGAVTTGHYANWVQQK | GALTSGVHTFPAVLQSSGLYSLSSVVTVPSSSLGT | GDYYCHYWDSRSPISW |
| | PGQAPRGLIGGTNKRAPWTPARFSGSLLGGK | QTYICNVNHKPSNTKVDKKVEPKSCDKTHTCPPCP | IFAGGTQLTVLGQPKA |
| | AALTLSGAQPEDEAEYYCALWYSNLWVFGGG | APEAAGGPSVFLFPPKPKDTLYITREPEVTCVVVD | APSVTLFPPSSEELQA |
| | TKLTVLEPKSSDKTHTCPPCPAPEAAGGPSV | VSHEDPEVKFNWYVDGVEVHNAKTKPREEQYNSTY | NKATLVCLISDFYPGA |
| | FLFPPKPKDTLMISRTPEVICVVVDVSHEDP | RVVSVLTVLHQDWLNGKEYKCKVSNKALPASIEKT | VTVAWKADSSPVKAGV |
| | EVKFNWYVDGVEVHNAKTKPREEQYNSTYRV | ISKAKGQPREPQVYTLPPSREEMTKNQVSLWCLVK | ETTTPSKQSNNKYAAS |
| | VSVLTVLHQDWLNGKEYKCKVSNKALPASIE | GFYPSDIAVEWESNGQPENNYKTTPPVLDSDGSFF | SYLSLTPEQWKSHRSY |
| | KTISKAKGQPREPQVYTLPPSREEMTKNQVS | LYSKLTVDKSRWQQGNVFSCSVMHEALHNHYTQKS | SCQVTHEGSTVEKTVA |
| | LSCAVKGFYPSDIAVEWESNGQPENNYKTTP | LSLSPGK | PTECS |
| | PVLDSDGSFFLVSKLTVDKSRWQQGNVFSCS | | |
| | VMHEALHNRYTQKSLSLSPGK | | |
| 312 | SEQ ID NO: 895 | SEQ ID NO: 888 | SEQ ID NO: 883 |
| PGT-134 | EVQLVESGGGLVQPGGSLRLSCAASGFTFNT | QVHLQESGPGLVTPSETLSLTCTVSNGSVSGRFWS | SLNPLSLAPGATAKIP |
| AAS + W/ | YAMNWVRQAPGKGLEWVGRIRSKYNNYATYY | WIRQSPGRGLEWIGYFSDTDRSEYNPSLRSRLTLS | CGERSRGSRAVQWYQQ |
| huSP34.1.3 | AASVKGRFTISRDDSKNSLYLQMNSLKTEDT | VDRSKNQLSLKLKSVTAADSATYYCARAQQGKRIY | KPGQAPTLIIYNNQDR |
| scFv | AMYYCVRHGNFGNSYVSWFAYWGQGTLVTVS | GIVSFGELFYYYYMDAWGKGTPVTVSSASTKGPSV | PAGVSERFSGNPDVAI |
| AAS + SAV + | SGGGGSGGGGSGGGGSGGGGSQAVVTQEPSL | FPLAPSSKSTSGGTAALGCLVKDYFPEPVTVSWNS | GVTATLTISRVEVGDE |
| R | TVSPGGTVTLTCGSSTGAVTTGHYANWVQQK | GALTSGVHTFPAVLQSSGLYSLSSVVTVPSSSLGT | GDYYCHYWDSRSPISW |
| | PGQAPRGLIGGTNKRAPWTPARFSGSLLGGK | QTYICNVNHKPSNTKVDKKVEPKSCDKTHTCPPCP | IFAGGTQLTVLGQPKA |
| | AALTLSGAQPEDEAEYYCALWYSNLWVFGGG | APEAAGGPSVFLFPPKPKDTLMISRTPEVTCVVVD | APSVTLFPPSSEELQA |
| | TKLTVLEPKSSDKTHTCPPCPAPEAAGGPSV | VSHEDPEVKFNWYVDGVEVHNAKTKPREEQYNSTY | NKATLVCLISDFYPGA |
| | FLFPPKPKDTLMISRTPEVICVVVDVSHEDP | RVVSVLTVLHQDWLNGKEYKCKVSNKALPASIEKT | VTVAWKADSSPVKAGV |
| | EVKFNWYVDGVEVHNAKTKPREEQYNSTYRV | ISKAKGQPREPQVYTLPPSREEMTKNQVSLWCLVK | ETTTPSKQSNNKYAAS |
| | VSVLTVLHQDWLNGKEYKCKVSNKALPASIE | GFYPSDIAVEWESNGQPENNYKTTPPVLDSDGSFF | SYLSLTPEQWKSHRSY |
| | KTISKAKGQPREPQVYTLPPSREEMTKNQVS | LYSKLTVDKSRWQQGNVFSCSVMHEALHNHYTQKS | SCQVTHEGSTVEKTVA |
| | LSCAVKGFYPSDIAVEWESNGQPENNYKTTP | LSLSPGK | PTECS |
| | PVLDSDGSFFLVSKLTVDKSRWQQGNVFSCS | | |
| | VMHEALHNRYTQKSLSLSPGK | | |
| 313 | SEQ ID NO: 895 | SEQ ID NO: 896 | SEQ ID NO: 883 |
| PGT-134 | EVQLVESGGGLVQPGGSLRLSCAASGFTFNT | QVHLQESGPGLVTPSETLSLTCTVSNGSVSGRFWS | SLNPLSLAPGATAKIP |
| AAS + W + LS/ | YAMNWVRQAPGKGLEWVGRIRSKYNNYATYY | WIRQSPGRGLEWIGYFSDTDRSEYNPSLRSRLTLS | CGERSRGSRAVQWYQQ |
| huSP34.1.3 scFv | AASVKGRFTISRDDSKNSLYLQMNSLKTEDT | VDRSKNQLSLKLKSVTAADSATYYCARAQQGKRIY | KPGQAPTLIIYNNQDR |
| AAS + SAV + | AMYYCVRHGNFGNSYVSWFAYWGQGTLVTVS | GIVSFGELFYYYYMDAWGKGTPVTVSSASTKGPSV | PAGVSERFSGNPDVAI |
| R | SGGGGSGGGGSGGGGSGGGGSQAVVTQEPSL | FPLAPSSKSTSGGTAALGCLVKDYFPEPVTVSWNS | GVTATLTISRVEVGDE |
| | TVSPGGTVTLTCGSSTGAVTTGHYANWVQQK | GALTSGVHTFPAVLQSSGLYSLSSVVTVPSSSLGT | GDYYCHYWDSRSPISW |
| | PGQAPRGLIGGTNKRAPWTPARFSGSLLGGK | QTYICNVNHKPSNTKVDKKVEPKSCDKTHTCPPCP | IFAGGTQLTVLGQPKA |
| | AALTLSGAQPEDEAEYYCALWYSNLWVFGGG | APEAAGGPSVFLFPPKPKDTLMISRTPEVTCVVVD | APSVTLFPPSSEELQA |
| | TKLTVLEPKSSDKTHTCPPCPAPEAAGGPSV | VSHEDPEVKFNWYVDGVEVHNAKTKPREEQYNSTY | NKATLVCLISDFYPGA |
| | FLFPPKPKDTLMISRTPEVICVVVDVSHEDP | RVVSVLTVLHQDWLNGKEYKCKVSNKALPASIEKT | VTVAWKADSSPVKAGV |
| | EVKFNWYVDGVEVHNAKTKPREEQYNSTYRV | ISKAKGQPREPQVYTLPPSREEMTKNQVSLWCLVK | ETTTPSKQSNNKYAAS |
| | VSVLTVLHQDWLNGKEYKCKVSNKALPASIE | GFYPSDIAVEWESNGQPENNYKTTPPVLDSDGSFF | SYLSLTPEQWKSHRSY |
| | KTISKAKGQPREPQVYTLPPSREEMTKNQVS | LYSKLTVDKSRWQQGNVFSCSVLHEALHSHYTQKS | SCQVTHEGSTVEKTVA |
| | LSCAVKGFYPSDIAVEWESNGQPENNYKTTP | LSLSPGK | PTECS |
| | PVLDSDGSFFLVSKLTVDKSRWQQGNVFSCS | | |
| | VMHEALHNRYTQKSLSLSPGK | | |
| 314 | SEQ ID NO: 897 | SEQ ID NO: 882 | SEQ ID NO: 883 |
| PGT-134 | EVQLVESGGGLVQPGGSLRLSCAASGFTFNT | QVHLQESGPGLVTPSETLSLTCTVSNGSVSGRFWS | SLNPLSLAPGATAKIP |
| AAS + SAV + | YAMNWVRQAPGKGLEWVGRIRSKYNNYATYY | WIRQSPGRGLEWIGYFSDTDRSEYNPSLRSRLTLS | CGERSRGSRAVQWYQQ |
| YTE/ | ADSVKGRFTISRDDSKNSLYLQMNSLRTEDT | VDRSKNQLSLKLKSVTAADSATYYCARAQQGKRIY | KPGQAPTLIIYNNQDR |
| huSP34.3.8scFv | AVYYCVRHGNFGHSYVSWFAYWGQGTLVTVS | GIVSFGELFYYYYMDAWGKGTPVTVSSASTKGPSV | PAGVSERFSGNPDVAI |
| AAS + W + YTE | SGGGGSGGGGSGGGGSGGGGSQAVVTQEPSL | FPLAPSSKSTSGGTAALGCLVKDYFPEPVTVSWNS | GVTATLTISRVEVGDE |
| | TVSPGGTVTLTCGSSTGAVTTGHYANWVQQK | GALTSGVHTFPAVLQSSGLYSLSSVVTVPSSSLGT | GDYYCHYWDSRSPISW |
| | PGQAPRGLIGGTNKRAPGVPARFSGSLLGGK | QTYICNVNHKPSNTKVDKKVEPKSCDKTHTCPPCP | IFAGGTQLTVLGQPKA |
| | AALTISGAQPEDEAEYYCALWYSNRWVFGGG | APEAAGGPSVFLFPPKPKDTLYITREPEVTCVVVD | APSVTLFPPSSEELQA |
| | TKLTVLEPKSSDKTHTCPPCPAPEAAGGPSV | VSHEDPEVKFNWYVDGVEVHNAKTKPREEQYNSTY | NKATLVCLISDFYPGA |
| | FLFPPKPKDTLYITREPEVTCVVVDVSHEDP | RVVSVLTVLHQDWLNGKEYKCKVSNKALPASIEKT | VTVAWKADSSPVKAGV |
| | EVKFNWYVDGVEVHNAKTKPREEQYNSTYRV | ISKAKGQPREPQVYTLPPSREEMTKNQVSLSCAVK | ETTTPSKQSNNKYAAS |
| | VSVLTVLHQDWLNGKEYKCKVSNKALPASIE | GFYPSDIAVEWESNGQPENNYKTTPPVLDSDGSFF | SYLSLTPEQWKSHRSY |
| | KTISKAKGQPREPQVYTLPPSREEMTKNQVS | LVSKLTVDKSRWQQGNVFSCSVMHEALHNHYTQKS | SCQVTHEGSTVEKTVA |
| | LWCLVKGFYPSDIAVEWESNGQPENNYKTTP | LSLSPGK | PTECS |
| | PVLDSDGSFFLYSKLTVDKSRWQQGNVFSCS | | |
| | VMHEALHNHYTQKSLSLSPGK | | |
| 315 | SEQ ID NO: 898 | SEQ ID NO: 886 | SEQ ID NO: 883 |
| PGT-134 | EVQLVESGGGLVQPGGSLRLSCAASGFTFNT | QVHLQESGPGLVTPSETLSLTCTVSNGSVSGRFWS | SLNPLSLAPGATAKIP |
| AAS + SAV/ | YAMNWVRQAPGKGLEWVGRIRSKYNNYATYY | WIRQSPGRGLEWIGYFSDTDRSEYNPSLRSRLTLS | CGERSRGSRAVQWYQQ |
| huSP34.3.8scFv | ADSVKGRFTISRDDSKNSLYLQMNSLRTEDT | VDRSKNQLSLKLKSVTAADSATYYCARAQQGKRIY | KPGQAPTLIIYNNQDR |
| AAS + W | AVYYCVRHGNFGHSYVSWFAYWGQGTLVTVS | GIVSFGELFYYYYMDAWGKGTPVTVSSASTKGPSV | PAGVSERFSGNPDVAI |
| | SGGGGSGGGGSGGGGSGGGGSQAVVTQEPSL | FPLAPSSKSTSGGTAALGCLVKDYFPEPVTVSWNS | GVTATLTISRVEVGDE |
| | TVSPGGTVTLTCGSSTGAVTTGHYANWVQQK | GALTSGVHTFPAVLQSSGLYSLSSVVTVPSSSLGT | GDYYCHYWDSRSPISW |
| | PGQAPRGLIGGTNKRAPGVPARFSGSLLGGK | QTYICNVNHKPSNTKVDKKVEPKSCDKTHTCPPCP | IFAGGTQLTVLGQPKA |
| | AALTISGAQPEDEAEYYCALWYSNRWVFGGG | APEAAGGPSVFLFPPKPKDTLMISRTPEVTCVVVD | APSVTLFPPSSEELQA |
| | TKLTVLEPKSSDKTHTCPPCPAPEAAGGPSV | VSHEDPEVKFNWYVDGVEVHNAKTKPREEQYNSTY | NKATLVCLISDFYPGA |
| | FLFPPKPKDTLMISRTPEVICVVVDVSHEDP | RVVSVLTVLHQDWLNGKEYKCKVSNKALPASIEKT | VTVAWKADSSPVKAGV |
| | EVKFNWYVDGVEVHNAKTKPREEQYNSTYRV | ISKAKGQPREPQVYTLPPSREEMTKNQVSLSCAVK | ETTTPSKQSNNKYAAS |
| | VSVLTVLHQDWLNGKEYKCKVSNKALPASIE | GFYPSDIAVEWESNGQPENNYKTTPPVLDSDGSFF | SYLSLTPEQWKSHRSY |
| | KTISKAKGQPREPQVYTLPPSREEMTKNQVS | LVSKLTVDKSRWQQGNVFSCSVMHEALHNHYTQKS | SCQVTHEGSTVEKTVA |
| | LWCLVKGFYPSDIAVEWESNGQPENNYKTTP | LSLSPGK | PTECS |
| | PVLDSDGSFFLYSKLTVDKSRWQQGNVFSCS | | |
| | VMHEALHNHYTQKSLSLSPGK | | |
| 316 | SEQ ID NO: 899 | SEQ ID NO: 882 | SEQ ID NO: 883 |
| PGT-134 | EVQLVESGGGLVQPGGSLRLSCAASGFTFNT | QVHLQESGPGLVTPSETLSLTCTVSNGSVSGRFWS | SLNPLSLAPGATAKIP |
| AAS + SAV + | YAMNWVRQAPGKGLEWVGRIRSKYNNYATYY | WIRQSPGRGLEWIGYFSDTDRSEYNPSLRSRLTLS | CGERSRGSRAVQWYQQ |
| YTE/ | AASVKGRFTISRDDSKNSLYLQMNSLKTEDT | VDRSKNQLSLKLKSVTAADSATYYCARAQQGKRIY | KPGQAPTLIIYNNQDR |
| huSP34.34.3scFv | AMYYCVRHGNFGHSYVSWFAYWGQGTLVTVS | GIVSFGELFYYYYMDAWGKGTPVTVSSASTKGPSV | PAGVSERFSGNPDVAI |
| AAS + W + YTE | SGGGGSGGGGSGGGGSGGGGSQAVVTQEPSL | FPLAPSSKSTSGGTAALGCLVKDYFPEPVTVSWNS | GVTATLTISRVEVGDE |
| | TVSPGGTVTLTCGSSTGAVTTGHYANWVQQK | GALTSGVHTFPAVLQSSGLYSLSSVVTVPSSSLGT | GDYYCHYWDSRSPISW |
| | PGQAPRGLIGGTNKRAPWTPARFSGSLLGGK | QTYICNVNHKPSNTKVDKKVEPKSCDKTHTCPPCP | IFAGGTQLTVLGQPKA |
| | AALTLSGAQPEDEAEYYCALWYSNLWVFGGG | APEAAGGPSVFLFPPKPKDTLYITREPEVTCVVVD | APSVTLFPPSSEELQA |
| | TKLTVLEPKSSDKTHTCPPCPAPEAAGGPSV | VSHEDPEVKFNWYVDGVEVHNAKTKPREEQYNSTY | NKATLVCLISDFYPGA |
| | FLFPPKPKDTLYITREPEVTCVVVDVSHEDP | RVVSVLTVLHQDWLNGKEYKCKVSNKALPASIEKT | VTVAWKADSSPVKAGV |
| | EVKFNWYVDGVEVHNAKTKPREEQYNSTYRV | ISKAKGQPREPQVYTLPPSREEMTKNQVSLSCAVK | ETTTPSKQSNNKYAAS |
| | VSVLTVLHQDWLNGKEYKCKVSNKALPASIE | GFYPSDIAVEWESNGQPENNYKTTPPVLDSDGSFF | SYLSLTPEQWKSHRSY |
| | KTISKAKGQPREPQVYTLPPSREEMTKNQVS | LVSKLTVDKSRWQQGNVFSCSVMHEALHNHYTQKS | SCQVTHEGSTVEKTVA |
| | LWCLVKGFYPSDIAVEWESNGQPENNYKTTP | LSLSPGK | PTECS |
| | PVLDSDGSFFLYSKLTVDKSRWQQGNVFSCS | | |
| | VMHEALHNHYTQKSLSLSPGK | | |
| 317 | SEQ ID NO: 900 | SEQ ID NO: 886 | SEQ ID NO: 883 |
| PGT-134 | EVQLVESGGGLVQPGGSLRLSCAASGFTFNT | QVHLQESGPGLVTPSETLSLTCTVSNGSVSGRFWS | SLNPLSLAPGATAKIP |
| AAS + SAV/ | YAMNWVRQAPGKGLEWVGRIRSKYNNYATYY | WIRQSPGRGLEWIGYFSDTDRSEYNPSLRSRLTLS | CGERSRGSRAVQWYQQ |
| huSP34.34.3scFv | AASVKGRFTISRDDSKNSLYLQMNSLKTEDT | VDRSKNQLSLKLKSVTAADSATYYCARAQQGKRIY | KPGQAPTLIIYNNQDR |
| AAS + W | AMYYCVRHGNFGHSYVSWFAYWGQGTLVTVS | GIVSFGELFYYYYMDAWGKGTPVTVSSASTKGPSV | PAGVSERFSGNPDVAI |
| | SGGGGSGGGGSGGGGSGGGGSQAVVTQEPSL | FPLAPSSKSTSGGTAALGCLVKDYFPEPVTVSWNS | GVTATLTISRVEVGDE |
| | TVSPGGTVTLTCGSSTGAVTTGHYANWVQQK | GALTSGVHTFPAVLQSSGLYSLSSVVTVPSSSLGT | GDYYCHYWDSRSPISW |
| | PGQAPRGLIGGTNKRAPWTPARFSGSLLGGK | QTYICNVNHKPSNTKVDKKVEPKSCDKTHTCPPCP | IFAGGTQLTVLGQPKA |
| | AALTLSGAQPEDEAEYYCALWYSNLWVFGGG | APEAAGGPSVFLFPPKPKDTLMISRTPEVTCVVVD | APSVTLFPPSSEELQA |
| | TKLTVLEPKSSDKTHTCPPCPAPEAAGGPSV | VSHEDPEVKFNWYVDGVEVHNAKTKPREEQYNSTY | NKATLVCLISDFYPGA |
| | FLFPPKPKDTLMISRTPEVICVVVDVSHEDP | RVVSVLTVLHQDWLNGKEYKCKVSNKALPASIEKT | VTVAWKADSSPVKAGV |
| | EVKFNWYVDGVEVHNAKTKPREEQYNSTYRV | ISKAKGQPREPQVYTLPPSREEMTKNQVSLSCAVK | ETTTPSKQSNNKYAAS |
| | VSVLTVLHQDWLNGKEYKCKVSNKALPASIE | GFYPSDIAVEWESNGQPENNYKTTPPVLDSDGSFF | SYLSLTPEQWKSHRSY |
| | KTISKAKGQPREPQVYTLPPSREEMTKNQVS | LVSKLTVDKSRWQQGNVFSCSVMHEALHNHYTQKS | SCQVTHEGSTVEKTVA |
| | LWCLVKGFYPSDIAVEWESNGQPENNYKTTP | LSLSPGK | PTECS |
| | PVLDSDGSFFLYSKLTVDKSRWQQGNVFSCS | | |
| | VMHEALHNHYTQKSLSLSPGK | | |

[0212] In some embodiments, one or more of the polypeptides comprising the multispecific antigen binding molecules described herein comprise an N-terminal signal peptide. The signal peptide can be an endogenous signal peptide (e.g., from a native or wild-type immunoglobulin or CD4 ECD protein), or from a heterologous polypeptide. In various embodiments, the signal peptide or leader sequence is from a source protein selected from a serum protein, an immunoglobulin, a cytokine, a chemokine, a chaperone protein, an invariant protein, and a protein that directs proteins to the lysosomal compartment. In various embodiments, the signal peptide or leader sequence is from a source protein selected from colony stimulating factor 2 (CSF2, GM-CSF), tissue type plasminogen activator (PLAT, t-PA), C-C motif chemokine ligand 7 (CCL7, MCP-3), C-X-C motif chemokine ligand 10 (CXCL10, IP-10), catenin beta 1 (CTNNB1), CD74 (p33; DHLAG; HLADG; immunoglobulin Kappa; Ia-GAMMA, invariant chain), serum albumin (ALB), SPARC (osteonectin), cwcv and kazal like domains proteoglycan 1 (SPOCK1); SPARC (osteonectin), cwcv and kazal like domains proteoglycan 2 (SPOCK2); polyubiquitin B/C (UBB/UBC), calreticulin (CALR), vesicular stomatitis virus G protein (VSV-G), lysosomal associated membrane protein 1 (LAMP-1) and lysosomal associated membrane protein 2 (LAMP-2). In some embodiments, the signal peptide is from a serum albumin signal peptide (e.g., comprising the amino acid sequence KWVTFISLLFLFSSAYS (SEQ ID NO: 1026)). In various embodiments, the signal peptide or leader sequence is selected from an amino acid sequence of any one of SEQ ID NOs: 1026-1039, or a sequence that is at least 95%, 96%, 97%, 98%, or 99% identical to any one of SEQ ID NOs: 1026-1039. Illustrative signal sequences that can be used in the present multi-specific binding proteins are provided in Table H.

TABLE H
illustrative signal sequences

| SEQ | source | |
|---|---|---|
| ID | protein | |
| NO: | name | SEQUENCE |
| 1026 | albumin | KWVTFISLLFLFSSAYS |
| 1027 | IL-2 | MYRMQLLSCIALSLALVTNS |
| 1028 | SPOCK1 | MPAIAVLAAAAAAWCFLQVES |
| 1029 | SPOCK2 | MRAPGCGRLVLPLLLLAAAALA |
| 1030 | Ig Kappa | METDTLLLWVLLLWVPG |
| 1031 | CSF2, | MWLQSLLLLGTVACSISV |
| | GM-CSF | |
| 1032 | PLAT, | MDAMKRGLCCVLLLCGAVFVSAR |
| | t-PA | |
| 1033 | CD74 | MHRRRSRSCREDQKPV |
| 1034 | β-catenin | MRKAAVSHWQQQSYLDSGIHSGATTTAPSLS |
| 1035 | CCL7, | MNPSAAVIFCLILLGLSGTQGILDMAQPVGINT |
| | MCP-3 | STTCCYRFINKKIPKQRLESYRRTTSSHCPREA |
| | | VIFKTKLDKEICADPTQKWVQDFMKHLDKKTQT |
| | | PKLASAGA |
| 1036 | ubiquitin | MQIFVKTLIGKTITLEVEPSDTIENVKAKIQDK |
| | | EGIPPDQQRLIFAGKQLEDGRTLSDYNIQKEST |
| | | LHLVLRLRGG |
| 1037 | calreti- | MLLSVPLLLGLLGLAVA |
| | culin | |
| 1038 | VSV-G | MKCLLYLAFLFIGVNC |
| 1039 | CXCL10, | MNQTAILICCLIFLTLSGIQG |
| | IP-10 | |

[0213] The signal peptide can be designed to be cleaved off, e.g., after secretion from the cell, to form a mature fusion protein. A modified human serum albumin signal peptide to secrete proteins in cells that can find use in expressing the present fusion proteins is described, e.g., in Attallah, et al., Protein Expr Purif. (2017) 132:27-33. Additional signal peptide sequences for use in expressing the herein described fusion proteins are described, e.g., in Kober, et al., Biotechnol Bioeng. (2013) 110(4):1164-73.

[0214] In various embodiments, multi-specific antigen binding molecules described herein, and/or the polynucleotides encoding such polypeptides, are provided in provided in isolated form. This means that such the polypeptide or polynucleotide is at least 50% w/w pure of interfering proteins, cellular and other contaminants arising from its production or purification but does not exclude the possibility that the agent is combined with an excess of pharmaceutical acceptable carrier(s) or other vehicle intended to facilitate its use. The term “isolated,” when applied to a polypeptide or polynucleotide, as described herein, denotes that the polypeptide or polynucleotide is essentially free of cellular components with which it is associated in the natural state. It can be, for example, in a homogeneous state and may be in either a dry or aqueous solution. Purity and homogeneity can be determined using known methods, e.g., analytical chemistry techniques such as polyacrylamide gel electrophoresis, column chromatography, thin layer chromatography, or high-performance liquid chromatography (HPLC) analysis. A protein that is the predominant species present in a preparation is substantially purified. An “isolated” or “purified” polypeptide or polynucleotide is substantially free of other cellular material, or culture medium when produced by recombinant techniques, or chemical precursors or other chemicals when chemically synthesized. In various embodiments, purified polypeptides and/or polynucleotides are at least 60%, 70%, 75%, 80%, 85%, 90%, 91%, 92%, 93%, 94%, 95%, 96%, 97%, 98%, 99%, or 100% (w/w), separated from, purified of, or free of interfering proteins and contaminants from production or purification. Often a multi-specific antigen binding molecule is the predominant macromolecular species remaining after its purification.

### 5. Conjugated Multi-Specific Antigen Binding Molecules

[0215] Any of the multi-specific antigen binding molecules described herein may be conjugated antigen binding molecules which are bound to various molecules (e.g., labels) including without limitation macromolecular substances such as polymers (e.g., polyethylene glycol (PEG), polyethylenimine (PEI) modified with PEG (PEI-PEG), polyglutamic acid (PGA) (N-(2-Hydroxypropyl) methacrylamide (HPMA) copolymers), hyaluronic acid, radioactive materials (e.g. ⁹⁰Y, ¹³¹I, ¹²⁵I, ³⁵S, ³H, ¹²¹In ⁹⁹Tc), fluorescent substances (e.g., fluorescein and rhodamine), luminescent substances (e.g., luminol), haptens, enzymes (e.g., glucose oxidase), metal chelates, biotin, avidin, and drugs.

[0216] The above-described conjugated multi-specific antigen binding molecules can be prepared according to known methods, e.g., performing chemical modifications on the antigen binding molecules or the lower molecular weight forms thereof described herein. Methods for modifying antibodies are well known in the art (e.g., U.S. Pat. Nos. 5,057,313 and 5,156,840).

### 6. Polynucleotides Encoding Multi-Specific Antigen Binding Molecules

[0217] Provided are polynucleotides encoding the multi-specific antigen binding molecules, described herein, vectors comprising such polynucleotides, and host cells (e.g., mammalian cells, plant cells, yeast cells, bacteria cells including E. coli cells) comprising such polynucleotides or expression vectors. Provided herein are polynucleotides comprising nucleotide sequence(s) encoding any of the multi-specific antigen binding molecules provided herein, as well as expression cassettes and vector(s) comprising such polynucleotide sequences, e.g., expression vectors for their efficient expression in host cells, e.g., mammalian cells.

[0218] Further provided are polynucleotides or nucleic acid molecules encoding a multi-specific antigen binding molecule or antigen binding fragment thereof, as described herein. In some embodiments, the polynucleotides encode an immunoglobulin heavy chain variable region (or a fragment thereof) and an immunoglobulin light chain variable region (or a fragment thereof), of one or both of the anti-CD3 binding domain and an anti-HIV antigen (e.g., anti-gp120, anti-gp41). In other embodiments, the polynucleotides or nucleic acid molecules are DNA, cDNA, or mRNA. In some other embodiments, the polynucleotides or nucleic acid molecules are codon-biased to enhance expression in a desired host cell.

[0219] In some embodiments, provided are polynucleotides encoding the VH, VL, or VH and VL of one or both of the first and second binding domains of the multi-specific antigen binding molecules or antigen binding fragments which bind to gp120. In certain instances, the polynucleotides encode one or more of CDRs, VH, VL, HC, LC and Fc regions comprising the amino acid sequences of the multi-specific antigen binding molecules set forth in one or more of Tables A1-A4, B1-B2, C, D1-D4, E, F and G, as described herein.

[0220] Provided herein are polynucleotides encoding the CDRs, VH, VL, light chain, or heavy chain of a multi-specific antigen binding molecule, described herein. In one embodiment, the polynucleotides can comprise nucleotide sequences encoding a heavy chain or heavy chain variable domain targeting CD3 comprising the VH CDRs of antibodies described herein (see, e.g., Tables A1-A4, B1, C and G, herein). In one embodiment, the polynucleotides can comprise nucleotide sequences encoding a light chain or light chain variable domain targeting CD3 comprising the VL CDRs of multi-specific antigen binding molecules described herein (see, e.g., Tables A1-A4, B2, C and G, herein). In one embodiment, a polynucleotide described herein encodes a heavy chain variable region or a heavy chain comprising VH-CDRs targeting CD3 comprising the amino acid sequences set forth in Tables A1, A2, A3 or A4, respectively. In one embodiment, a polynucleotide described herein encodes a light chain variable region or a light chain comprising VL-CDRs targeting CD3 comprising the amino acid sequences set forth in Tables A1, A2, A3 or A4, respectively. In some embodiments, the polynucleotide or polynucleotides encode a first heavy chain variable domain (VH) and a first light chain variable domain (VL) that target, bind to or specifically bind to CD3, comprising a first VH-CDR1, a first VH-CDR2, a first VH-CDR3, a first VL-CDR1, a first VL-CDR2 and a first VL-CDR3 comprising the following amino acid sequences (according to Kabat), respectively: SEQ ID NOs: 1, 11, 8, 4, 9 and 10; SEQ ID NOs: 1, 12, 8, 4, 9 and 10; SEQ ID NOs: 1, 13, 8, 4, 14 and 15; SEQ ID NOs: 1, 13, 16, 4, 14 and 15; or SEQ ID NOs: 1, 11, 8, 4, 14 and 10. In some embodiments, the polynucleotide or polynucleotides encode a first heavy chain variable domain (VH) and a first light chain variable domain (VL) that target, bind to or specifically bind to CD3, comprising a first VH-CDR1, a first VH-CDR2, a first VH-CDR3, a first VL-CDR1, a first VL-CDR2 and a first VL-CDR3 comprising the following amino acid sequences (according to Kabat), respectively: SEQ ID NOs: 1, 11, 8, 4, 9 and 10; or SEQ ID NOs: 1, 12, 8, 4, 9 and 10. In some embodiments, the polynucleotide or polynucleotides encode a first heavy chain variable domain (VH) and a first light chain variable domain (VL) that target, bind to or specifically bind to CD3, comprising a first VH-CDR1, a first VH-CDR2, a first VH-CDR3, a first VL-CDR1, a first VL-CDR2 and a first VL-CDR3 comprising the following amino acid sequences (according to Kabat), respectively: SEQ ID NOs: 1, 11, 8, 4, 9 and 10. In some embodiments, the polynucleotide or polynucleotides encode a first heavy chain variable domain (VH) and a first light chain variable domain (VL) that target, bind to or specifically bind to CD3, comprising a first VH-CDR1, a first VH-CDR2, a first VH-CDR3, a first VL-CDR1, a first VL-CDR2 and a first VL-CDR3 comprising the following amino acid sequences (according to Kabat), respectively: SEQ ID NOs: 1, 12, 8, 4, 9 and 10.

[0221] In some embodiments, the polynucleotide or polynucleotides encode a first heavy chain variable domain (VH) and a first light chain variable domain (VL) that target, bind to or specifically bind to CD3, comprising a first VH-CDR1, a first VH-CDR2, a first VH-CDR3, a first VL-CDR1, a first VL-CDR2 and a first VL-CDR3 comprising the following amino acid sequences (according to Chothia), respectively: SEQ ID NOs: 17, 18, 23, 20, 24 and 25; SEQ ID NOs: 17, 18, 23, 20, 26 and 27; SEQ ID NOs: 17, 18, 75, 20, 26 and 27; or SEQ ID NOs: 17, 18, 23, 20, 26 and 25. In some embodiments, the polynucleotide or polynucleotides encode a first heavy chain variable domain (VH) and a first light chain variable domain (VL) that target, bind to or specifically bind to CD3, comprising a first VH-CDR1, a first VH-CDR2, a first VH-CDR3, a first VL-CDR1, a first VL-CDR2 and a first VL-CDR3 comprising the following amino acid sequences (according to Chothia), respectively: SEQ ID NOs: 17, 18, 23, 20, 24 and 25.

[0222] In some embodiments, the polynucleotide or polynucleotides encode a first heavy chain variable domain (VH) and a first light chain variable domain (VL) that target, bind to or specifically bind to CD3, comprising a first VH-CDR1, a first VH-CDR2, a first VH-CDR3, a first VL-CDR1, a first VL-CDR2 and a first VL-CDR3 comprising the following amino acid sequences (according to IMGT), respectively: SEQ ID NOs: 28, 29, 32, 31, 24 and 10; SEQ ID NOs: 28, 29, 32, 31, 26 and 15; SEQ ID NOs: 28, 29, 33, 31, 26 and 15; or SEQ ID NOs: 28, 29, 32, 31, 26 and 10. In some embodiments, the polynucleotide or polynucleotides encode a first heavy chain variable domain (VH) and a first light chain variable domain (VL) that target, bind to or specifically bind to CD3, comprising a first VH-CDR1, a first VH-CDR2, a first VH-CDR3, a first VL-CDR1, a first VL-CDR2 and a first VL-CDR3 comprising the following amino acid sequences (according to IMGT), respectively: SEQ ID NOs: 28, 29, 32, 31, 24 and 10.

[0223] In some embodiments, the polynucleotide or polynucleotides encode a first heavy chain variable domain (VH) and a first light chain variable domain (VL) that target, bind to or specifically bind to CD3, comprising a first VH-CDR1, a first VH-CDR2, a first VH-CDR3, a first VL-CDR1, a first VL-CDR2 and a first VL-CDR3 comprising the following amino acid sequences (according to Honegger), respectively: SEQ ID NOs: 34, 42, 40, 37, 41 and 25; SEQ ID NOs: 34, 43, 40, 37, 41 and 25; SEQ ID NOs: 34, 44, 40, 37, 45 and 27; SEQ ID NOs: 34, 44, 46, 37, 45 and 27; or SEQ ID NOs: 34, 42, 40, 37, 47 and 25. In some embodiments, the polynucleotide or polynucleotides encode a first heavy chain variable domain (VH) and a first light chain variable domain (VL) that target, bind to or specifically bind to CD3, comprising a first VH-CDR1, a first VH-CDR2, a first VH-CDR3, a first VL-CDR1, a first VL-CDR2 and a first VL-CDR3 comprising the following amino acid sequences (according to Honegger), respectively: SEQ ID NOs: 34, 42, 40, 37, 41 and 25; or SEQ ID NOs: 34, 43, 40, 37, 41 and 25. In some embodiments, the polynucleotide or polynucleotides encode a first heavy chain variable domain (VH) and a first light chain variable domain (VL) that target, bind to or specifically bind to CD3, comprising a first VH-CDR1, a first VH-CDR2, a first VH-CDR3, a first VL-CDR1, a first VL-CDR2 and a first VL-CDR3 comprising the following amino acid sequences (according to Honegger), respectively: SEQ ID NOs: 34, 42, 40, 37, 41 and 25. In some embodiments, the polynucleotide or polynucleotides encode a first heavy chain variable domain (VH) and a first light chain variable domain (VL) that target, bind to or specifically bind to CD3, comprising a first VH-CDR1, a first VH-CDR2, a first VH-CDR3, a first VL-CDR1, a first VL-CDR2 and a first VL-CDR3 comprising the following amino acid sequences (according to Honegger), respectively: SEQ ID NOs: 34, 43, 40, 37, 41 and 25.

[0224] In one embodiment, a polynucleotide described herein encodes a heavy chain variable region or a heavy chain targeting CD3 comprising the amino acid sequences set forth in Table B1. In one embodiment, a polynucleotide described herein encodes a light chain variable region or a light chain targeting CD3 comprising the amino acid sequences set forth in Table B2. In some embodiments, the polynucleotide encodes a first VH comprising an amino acid sequence that is at least 80%, at least 85%, at least 90%, at least 91%, at least 92%, at least 93%, at least 94%, at least 95%, at least 96%, at least 97%, at least 98%, at least 99% identical, or is 100% identical, to an amino acid sequence selected from the group consisting of SEQ ID NOs: 48-53. In some embodiments, the polynucleotide encodes a first VH comprising an amino acid sequence that is at least 80%, at least 85%, at least 90%, at least 91%, at least 92%, at least 93%, at least 94%, at least 95%, at least 96%, at least 97%, at least 98%, at least 99% identical, or is 100% identical, to the amino acid sequence of SEQ ID NO: 50. In some embodiments, the polynucleotide encodes a first VH comprising an amino acid sequence that is at least 80%, at least 85%, at least 90%, at least 91%, at least 92%, at least 93%, at least 94%, at least 95%, at least 96%, at least 97%, at least 98%, at least 99% identical, or is 100% identical, to the amino acid sequence of SEQ ID NO: 51. In some embodiments, the polynucleotide encodes a first VL comprising an amino acid sequence that is at least 80%, at least 85%, at least 90%, at least 91%, at least 92%, at least 93%, at least 94%, at least 95%, at least 96%, at least 97%, at least 98%, at least 99% identical, or is 100% identical, to an amino acid sequence of SEQ ID NO: 54-58. In some embodiments, the polynucleotide encodes a first VL comprising an amino acid sequence that is at least 80%, at least 85%, at least 90%, at least 91%, at least 92%, at least 93%, at least 94%, at least 95%, at least 96%, at least 97%, at least 98%, at least 99% identical, or is 100% identical, to the amino acid sequence of SEQ ID NO: 56. In some embodiments, the polynucleotide or polynucleotides encode a first VH comprising an amino acid sequence that is at least 80%, at least 85%, at least 90%, at least 91%, at least 92%, at least 93%, at least 94%, at least 95%, at least 96%, at least 97%, at least 98%, at least 99% identical, or is 100% identical, to an amino acid sequence selected from the group consisting of SEQ ID NOs: 48-53 and encode a first VL comprising an amino acid sequence that is at least 80%, at least 85%, at least 90%, at least 91%, at least 92%, at least 93%, at least 94%, at least 95%, at least 96%, at least 97%, at least 98%, at least 99% identical, or is 100% identical, to an amino acid sequence of SEQ ID NO: 54-58. In some embodiments, the polynucleotide or polynucleotides encode a first VH comprising an amino acid sequence that is at least 80%, at least 85%, at least 90%, at least 91%, at least 92%, at least 93%, at least 94%, at least 95%, at least 96%, at least 97%, at least 98%, at least 99% identical, or is 100% identical, to the amino acid sequence of SEQ ID NO: 51 and encode a first VL comprising an amino acid sequence that is at least 80%, at least 85%, at least 90%, at least 91%, at least 92%, at least 93%, at least 94%, at least 95%, at least 96%, at least 97%, at least 98%, at least 99% identical, or is 100% identical, to the amino acid sequence of SEQ ID NO: 56.

[0225] In various embodiments, the polynucleotide or polynucleotides encode a first VH and a first VL, the first VH and the first VL comprising amino acid sequences that are at least 80%, at least 85%, at least 90%, at least 91%, at least 92%, at least 93%, at least 94%, at least 95%, at least 96%, at least 97%, at least 98%, at least 99% identical, or is 100% identical, to the amino acid sequences set forth, respectively: SEQ ID NOs: 48 and 54; SEQ ID NOs: 49 and 55; SEQ ID NOs: 50 and 55; SEQ ID NOs: 50 and 56; SEQ ID NOs: 51 and 55; SEQ ID NOs: 51 and 56; SEQ ID NOs: 52 and 56; SEQ ID NOs: 53 and 57; or SEQ ID NOs: 50 and 58. In various embodiments, the polynucleotide or polynucleotides encode a first VH and a first VL, the first VH and the first VL comprising amino acid sequences that are at least 80%, at least 85%, at least 90%, at least 91%, at least 92%, at least 93%, at least 94%, at least 95%, at least 96%, at least 97%, at least 98%, at least 99% identical, or is 100% identical, to the amino acid sequences set forth, respectively: SEQ ID NOs: 49 and 55; SEQ ID NOs: 50 and 55; SEQ ID NOs: 50 and 56; SEQ ID NOs: 51 and 55; or SEQ ID NOs: 51 and 56.

[0226] In some embodiments, the polynucleotide or polynucleotides encode a first VH and a first VL, the first VH and the first VL comprising amino acid sequences that are at least 80%, at least 85%, at least 90%, at least 91%, at least 92%, at least 93%, at least 94%, at least 95%, at least 96%, at least 97%, at least 98%, at least 99% identical, or is 100% identical, to the amino acid sequence set forth, respectively: SEQ ID NO: 50 and 56. In some embodiments, the polynucleotide or polynucleotides encode a first VH and a first VL, the first VH and the first VL comprising amino acid sequences that are at least 95% identical to the amino acid sequence set forth, respectively: SEQ ID NO: 50 and 56. In some embodiments, the polynucleotide or polynucleotides encode a first VH and a first VL, the first VH and the first VL comprising amino acid sequences that are at least 99% identical to the amino acid sequence set forth, respectively: SEQ ID NO: 50 and 56. In some embodiments, the polynucleotide or polynucleotides encode a first VH and a first VL, the first VH and the first VL comprising amino acid sequences that are 100% identical to the amino acid sequence set forth, respectively: SEQ ID NO: 50 and 56. In some embodiments, the polynucleotide or polynucleotides encode a first VH and a first VL, the first VH comprising the amino acid sequence of SEQ ID NO: 50 and the first VL comprising an amino acid sequence that is at least 95% identical to the amino acid sequence of SEQ ID NO: 56. In some embodiments, the polynucleotide or polynucleotides encode a first VH and a first VL, the first VH comprising the amino acid sequence of SEQ ID NO: 50 and the first VL comprising an amino acid sequence that is at least 96% identical to the amino acid sequence of SEQ ID NO: 56. In some embodiments, the polynucleotide or polynucleotides encode a first VH and a first VL, the first VH comprising the amino acid sequence of SEQ ID NO: 50 and the first VL comprising an amino acid sequence that is at least 97% identical to the amino acid sequence of SEQ ID NO: 56. In some embodiments, the polynucleotide or polynucleotides encode a first VH and a first VL, the first VH comprising the amino acid sequence of SEQ ID NO: 50 and the first VL comprising an amino acid sequence that is at least 98% identical to the amino acid sequence of SEQ ID NO: 56. In some embodiments, the polynucleotide or polynucleotides encode a first VH and a first VL, the first VH comprising the amino acid sequence of SEQ ID NO: 50 and the first VL comprising an amino acid sequence that is at least 99% identical to the amino acid sequence of SEQ ID NO: 56. In some embodiments, the polynucleotide or polynucleotides encode a first VH and a first VL, the first VH comprising an amino acid sequence that is at least 95% identical to the amino acid sequence of SEQ ID NO: 50 and the first VL comprising the amino acid sequence of SEQ ID NO: 56. In some embodiments, the polynucleotide or polynucleotides encode a first VH and a first VL, the first VH comprising an amino acid sequence that is at least 96% identical to the amino acid sequence of SEQ ID NO: 50 and the first VL comprising the amino acid sequence of SEQ ID NO: 56. In some embodiments, the polynucleotide or polynucleotides encode a first VH and a first VL, the first VH comprising an amino acid sequence that is at least 97% identical to the amino acid sequence of SEQ ID NO: 50 and the first VL comprising the amino acid sequence of SEQ ID NO: 56. In some embodiments, the polynucleotide or polynucleotides encode a first VH and a first VL, the first VH comprising an amino acid sequence that is at least 98% identical to the amino acid sequence of SEQ ID NO: 50 and the first VL comprising the amino acid sequence of SEQ ID NO: 56. In some embodiments, the polynucleotide or polynucleotides encode a first VH and a first VL, the first VH comprising an amino acid sequence that is at least 99% identical to the amino acid sequence of SEQ ID NO: 50 and the first VL comprising the amino acid sequence of SEQ ID NO: 56.

[0227] In some embodiments, the polynucleotide or polynucleotides encode a first VH and a first VL, the first VH and the first VL comprising amino acid sequences that are at least 80%, at least 85%, at least 90%, at least 91%, at least 92%, at least 93%, at least 94%, at least 95%, at least 96%, at least 97%, at least 98%, at least 99% identical, or is 100% identical, to the amino acid sequence set forth, respectively: SEQ ID NO: 51 and 56. In some embodiments, the polynucleotide or polynucleotides encode a first VH and a first VL, the first VH and the first VL comprising amino acid sequences that are at least 95% identical to the amino acid sequence set forth, respectively: SEQ ID NO: 51 and 56. In some embodiments, the polynucleotide or polynucleotides encode a first VH and a first VL, the first VH and the first VL comprising amino acid sequences that are at least 99% identical to the amino acid sequence set forth, respectively: SEQ ID NO: 51 and 56. In some embodiments, the polynucleotide or polynucleotides encode a first VH and a first VL, the first VH and the first VL comprising amino acid sequences that are 100% identical to the amino acid sequence set forth, respectively: SEQ ID NO: 51 and 56. In some embodiments, the polynucleotide or polynucleotides encode a first VH and a first VL, the first VH comprising the amino acid sequence of SEQ ID NO: 51 and the first VL comprising an amino acid sequence that is at least 95% identical to the amino acid sequence of SEQ ID NO: 56. In some embodiments, the polynucleotide or polynucleotides encode a first VH and a first VL, the first VH comprising the amino acid sequence of SEQ ID NO: 51 and the first VL comprising an amino acid sequence that is at least 96% identical to the amino acid sequence of SEQ ID NO: 56. In some embodiments, the polynucleotide or polynucleotides encode a first VH and a first VL, the first VH comprising the amino acid sequence of SEQ ID NO: 51 and the first VL comprising an amino acid sequence that is at least 97% identical to the amino acid sequence of SEQ ID NO: 56. In some embodiments, the polynucleotide or polynucleotides encode a first VH and a first VL, the first VH comprising the amino acid sequence of SEQ ID NO: 51 and the first VL comprising an amino acid sequence that is at least 98% identical to the amino acid sequence of SEQ ID NO: 56. In some embodiments, the polynucleotide or polynucleotides encode a first VH and a first VL, the first VH comprising the amino acid sequence of SEQ ID NO: 51 and the first VL comprising an amino acid sequence that is at least 99% identical to the amino acid sequence of SEQ ID NO: 56. In some embodiments, the polynucleotide or polynucleotides encode a first VH and a first VL, the first VH comprising an amino acid sequence that is at least 95% identical to the amino acid sequence of SEQ ID NO: 51 and the first VL comprising the amino acid sequence of SEQ ID NO: 56. In some embodiments, the polynucleotide or polynucleotides encode a first VH and a first VL, the first VH comprising an amino acid sequence that is at least 96% identical to the amino acid sequence of SEQ ID NO: 51 and the first VL comprising the amino acid sequence of SEQ ID NO: 56. In some embodiments, the polynucleotide or polynucleotides encode a first VH and a first VL, the first VH comprising an amino acid sequence that is at least 97% identical to the amino acid sequence of SEQ ID NO: 51 and the first VL comprising the amino acid sequence of SEQ ID NO: 56. In some embodiments, the polynucleotide or polynucleotides encode a first VH and a first VL, the first VH comprising an amino acid sequence that is at least 98% identical to the amino acid sequence of SEQ ID NO: 51 and the first VL comprising the amino acid sequence of SEQ ID NO: 56. In some embodiments, the polynucleotide or polynucleotides encode a first VH and a first VL, the first VH comprising an amino acid sequence that is at least 99% identical to the amino acid sequence of SEQ ID NO: 51 and the first VL comprising the amino acid sequence of SEQ ID NO: 56.

[0228] In some embodiments, the polynucleotide encodes a scFv comprising a VH and a VL, the scFv comprises an amino acid sequence that is at least 80%, at least 85%, at least 90%, at least 91%, at least 92%, at least 93%, at least 94%, at least 95%, at least 96%, at least 97%, at least 98%, at least 99%, or at least 100%, identical to an amino acid sequence selected from SEQ ID NOs: 59-66, e.g., SEQ ID NOs: 59-66, e.g., SEQ ID NOs: 59-63, e.g., SEQ ID NOs: 61, 62 or 63, e.g., SEQ ID NOs: 62 or 63.

[0229] Provided herein are polynucleotides encoding the CDRs, VH, VL, light chain, or heavy chain of a multi-specific antigen binding molecule, described herein. In one embodiment, the polynucleotides can comprise nucleotide sequences encoding a heavy chain or heavy chain variable domain targeting an HIV antigen (e.g., HIV gp120) comprising the VH CDRs of antibodies described herein (see, e.g., Tables D1-D4, E and G, herein). In one embodiment, the polynucleotides can comprise nucleotide sequences encoding a light chain or light chain variable domain targeting an HIV antigen (e.g., HIV gp120) comprising the VL CDRs of multi-specific antigen binding molecules described herein (see, e.g., Tables D1-D4, E and G, herein). In one embodiment, a polynucleotide described herein encodes a heavy chain variable region or a heavy chain comprising VH-CDRs targeting an HIV antigen (e.g., HIV gp120) comprising the amino acid sequences set forth in Tables D1, D2, D3 or D4, respectively. In one embodiment, a polynucleotide described herein encodes a light chain variable region or a light chain comprising VL-CDRs targeting an HIV antigen (e.g., HIV gp120) comprising the amino acid sequences set forth in Tables D1, D2, D3 or D4, respectively.

[0230] In one embodiments, the polynucleotide or polynucleotides encode a second heavy chain variable domain (VH) and a second light chain variable domain (VL) that target, bind to or specifically bind to an HIV antigen (e.g., HIV gp120), comprising a second VH-CDR1, a second VH-CDR2, a second VH-CDR3, a second VL-CDR1, a second VL-CDR2 and a second VL-CDR3 comprising the amino acid sequences (according to Kabat) set forth, respectively, in: SEQ ID NOs: 76, 77, 78, 79, 80 and 81; SEQ ID NOs: 76, 82, 78, 79, 80 and 81; SEQ ID NOs: 83, 84, 85, 86, 80 and 87; SEQ ID NOs: 83, 88, 85, 86, 80 and 87; SEQ ID NOs: 90, 91, 92, 93, 94 and 95; SEQ ID NOs: 90, 91, 96, 93, 94 and 95; SEQ ID NOs: 97, 98, 99, 100, 101 and 102; SEQ ID NOs: 103, 104, 105, 106, 94 and 107; SEQ ID NOs: 108, 109, 110, 111, 112 and 113; SEQ ID NOs: 114, 115, 116, 117, 118 and 119; SEQ ID NOs: 114, 120, 121, 122, 118 and 123; SEQ ID NOs: 124, 125, 126, 127, 128 and 113; SEQ ID NOs: 129, 115, 131, 127, 118 and 113; SEQ ID NOs: 132, 133, 134, 135, 136 and 137; SEQ ID NOs: 138, 139, 140, 141, 142 and 143; SEQ ID NOs: 144, 145, 146, 147, 148 and 143; SEQ ID NOs: 149, 150, 151, 152, 153 and 143; SEQ ID NOs: 154, 155, 156, 157, 158 and 159; SEQ ID NOs: 160, 161, 162, 163, 164 and 165; SEQ ID NOs: 166, 161, 167, 163, 164 and 165; SEQ ID NOs: 168, 169, 170, 171, 172 and 173; SEQ ID NOs: 168, 174, 170, 171, 172 and 173; SEQ ID NOs: 175, 176, 177, 171, 172 and 173; SEQ ID NOs: 178, 179, 180, 181, 182 and 183; SEQ ID NOs: 184, 185, 186, 187, 188 and 189; SEQ ID NOs: 190, 191, 192, 193, 194 and 195; SEQ ID NOs: 196, 197, 198, 199, 200 and 201; SEQ ID NOs: 202, 203, 204, 205, 206 and 207; SEQ ID NOs: 208, 209, 210, 211, 212 and 213; SEQ ID NOs: 214, 215, 216, 217, 218 and 219; SEQ ID NOs: 214, 220, 216, 221, 218 and 219; SEQ ID NOs: 214, 220, 222, 221, 218 and 219; SEQ ID NOs: 223, 224, 225, 226, 227 and 228; SEQ ID NOs: 229, 230, 231, 232, 233 and 234; SEQ ID NOs: 902, 903, 904, 905, 906 and 907; SEQ ID NOs: 908, 909, 910, 911, 912 and 913; SEQ ID NOs: 914, 915, 916, 917, 918 and 919; or SEQ ID NOs: 920, 921, 922, 923, 924 and 925.

[0231] In one embodiments, the polynucleotide or polynucleotides encode a second heavy chain variable domain (VH) and a second light chain variable domain (VL) that target, bind to or specifically bind to an HIV antigen (e.g., HIV gp120), comprising a second VH-CDR1, a second VH-CDR2, a second VH-CDR3, a second VL-CDR1, a second VL-CDR2 and a second VL-CDR3 comprising the amino acid sequences (according to Chothia) set forth, respectively, in: SEQ ID NOs: 235, 236, 237, 238, 239 and 240; SEQ ID NOs: 241, 242, 243, 244, 239 and 245; SEQ ID NOs: 246, 242, 247, 244, 239 and 245; SEQ ID NOs: 248, 249, 250, 251, 239 and 252; SEQ ID NOs: 248, 249, 253, 251, 239 and 252; SEQ ID NOs: 254, 255, 256, 257, 258 and 259; SEQ ID NOs: 260, 261, 262, 263, 239 and 264; SEQ ID NOs: 265, 266, 267, 268, 269 and 270; SEQ ID NOs: 271, 272, 273, 274, 275 and 270; SEQ ID NOs: 271, 276, 277, 278, 275 and 279; SEQ ID NOs: 280, 281, 282, 283, 284 and 270; SEQ ID NOs: 285, 272, 286, 283, 275 and 270; SEQ ID NOs: 287, 288, 289, 290, 291 and 292; SEQ ID NOs: 293, 294, 295, 296, 297 and 298; SEQ ID NOs: 299, 300, 301, 302, 303 and 298; SEQ ID NOs: 304, 300, 305, 406, 307 and 298; SEQ ID NOs: 308, 309, 310, 311, 312 and 313; SEQ ID NOs: 314, 315, 316, 317, 318 and 165; SEQ ID NOs: 320, 315, 321, 317, 318 and 165; SEQ ID NOs: 322, 323, 324, 325, 326 and 327; SEQ ID NOs: 322, 328, 324, 325, 326 and 327; SEQ ID NOs: 329, 323, 330, 325, 326 and 327; SEQ ID NOs: 331, 332, 333, 334, 335 and 336; SEQ ID NOs: 337, 338, 339, 340, 341 and 342; SEQ ID NOs: 343, 344, 345, 346, 341 and 347; SEQ ID NOs:348, 349, 350, 351, 352 and 353; SEQ ID NOs: 354, 355, 356, 357, 358 and 359; SEQ ID NOs: 360, 361, 362, 363, 364 and 365; SEQ ID NOs: 366, 367, 368, 369, 370 and 371; SEQ ID NOs: 366, 361, 368, 369, 370 and 371; SEQ ID NOs: 372, 361, 373, 369, 370 and 371; SEQ ID NOs: 374, 375, 376, 377, 378 and 379; or SEQ ID NOs: 380, 381, 382, 383, 384 and 385.

[0232] In one embodiments, the polynucleotide or polynucleotides encode a second heavy chain variable domain (VH) and a second light chain variable domain (VL) that target, bind to or specifically bind to an HIV antigen (e.g., HIV gp120), comprising a second VH-CDR1, a second VH-CDR2, a second VH-CDR3, a second VL-CDR1, a second VL-CDR2 and a second VL-CDR3 comprising the amino acid sequences (according to IMGT) set forth, respectively, in: SEQ ID NOs: 386, 387, 388, 389, 239 and 81; SEQ ID NOs: 390, 391, 392, 393, 239 and 87; SEQ ID NOs: 390, 391, 394, 393, 239 and 87; SEQ ID NOs: 395, 396, 397, 393, 239 and 87; SEQ ID NOs: 398, 399, 400, 401, 239 and 95; SEQ ID NOs: 398, 399, 402, 401, 239 and 95; SEQ ID NOs: 403, 404, 405, 406, 258 and 102; SEQ ID NOs: 407, 408, 409, 410, 239 and 107; SEQ ID NOs: 411, 412, 413, 414, 269 and 113; SEQ ID NOs: 415, 416, 417, 418, 275 and 119; SEQ ID NOs: 415, 419, 420, 421, 275 and 123; SEQ ID NOs: 422, 423, 424, 425, 275 and 113; SEQ ID NOs: 426, 416, 427, 425, 275 and 113; SEQ ID NOs: 428, 429, 430, 431, 291 and 137; SEQ ID NOs: 432, 433, 434, 435, 297 and 143; SEQ ID NOs: 436, 437, 438, 439, 303 and 143; SEQ ID NOs: 440, 437, 441, 442, 307 and 143; SEQ ID NOs: 443, 444, 445, 446, 312 and 159; SEQ ID NOs: 447, 448, 449, 450, 318 and 165; SEQ ID NOs: 451, 448, 452, 450, 318 and 165; SEQ ID NOs: 453, 454, 455, 456, 326 and 173; SEQ ID NOs: 453, 457, 455, 456, 326 and 173; SEQ ID NOs: 458, 459, 460, 456, 326 and 173; SEQ ID NOs: 461, 462, 463, 464, 335 and 183; SEQ ID NOs: 465, 466, 467, 468, 341 and 189; SEQ ID NOs: 469, 470, 471, 472, 341 and 195; SEQ ID NOs: 473, 474, 475, 476, 352 and 201; SEQ ID NOs: 477, 478, 479, 480, 358 and 207; SEQ ID NOs: 481, 482, 483, 484, 364 and 213; SEQ ID NOs: 485, 486, 487, 488, 370 and 219; SEQ ID NOs: 485, 482, 487, 488, 370 and 219; SEQ ID NOs: 489, 482, 490, 488, 370 and 219; SEQ ID NOs: 491, 492, 493, 494, 378 and 228; SEQ ID NOs: 495, 496, 497, 498, 384 and 234; SEQ ID NOs: 950, 951, 952, 953, 930 and 907; SEQ ID NOs: 954, 955, 956, 957, 936 and 913; SEQ ID NOs: 958, 959, 960, 961, 942 and 919; or SEQ ID NOs: 962, 963, 964, 965, 948 and 925.

[0233] In one embodiments, the polynucleotide or polynucleotides encode a second heavy chain variable domain (VH) and a second light chain variable domain (VL) that target, bind to or specifically bind to an HIV antigen (e.g., HIV gp120), comprising a second VH-CDR1, a second VH-CDR2, a second VH-CDR3, a second VL-CDR1, a second VL-CDR2 and a second VL-CDR3 comprising the amino acid sequences (according to Honegger) set forth, respectively, in: SEQ ID NOs: 499, 500, 501, 238, 502 and 240; SEQ ID NOs: 499, 503, 501, 238, 502 and 240; SEQ ID NOs: 505, 506, 507, 244, 502 and 245; SEQ ID NOs: 508, 509, 510, 244, 502 and 245; SEQ ID NOs: 511, 512, 513, 251, 514 and 252; SEQ ID NOs: 511, 512, 515, 251, 514 and 252; SEQ ID NOs: 516, 517, 518, 257, 519 and 259; SEQ ID NOs: 520, 521, 522, 264, 523 and 264; SEQ ID NOs: 524, 525, 526, 268, 527 and 270; SEQ ID NOs: 528, 529, 530, 274, 531 and 270; SEQ ID NOs: 528, 532, 533, 278, 531 and 279; SEQ ID NOs: 534, 535, 536, 283, 537 and 270; SEQ ID NOs: 1090, 529, 538, 283, 531 and 270; SEQ ID NOs: 539, 540, 541, 290, 542 and 292; SEQ ID NOs: 543, 544, 545, 546, 547 and 298; SEQ ID NOs: 548, 549, 550, 1091, 551 and 298; SEQ ID NOs: 552, 553, 554, 555, 556 and 298; SEQ ID NOs: 557, 558, 559, 311, 560 and 313; SEQ ID NOs: 561, 562, 563, 564, 565 and 165; SEQ ID NOs: 566, 562, 1092, 564, 567 and 165; SEQ ID NOs: 568, 569, 570, 571, 572 and 327; SEQ ID NOs: 568, 573, 570, 571, 572 and 327; SEQ ID NOs: 574, 575, 576, 571, 572 and 327; SEQ ID NOs: 577, 578, 579, 580, 581 and 336; SEQ ID NOs: 582, 583, 584, 340, 585 and 342; SEQ ID NOs: 586, 587, 588, 346, 589 and 347; SEQ ID NOs: 590, 591, 592, 351, 593 and 353; SEQ ID NOs: 594, 595, 596, 597, 598 and 359; SEQ ID NOs: 599, 600, 601, 602, 603 and 365; SEQ ID NOs: 604, 605, 606, 607, 608 and 371; SEQ ID NOs: 604, 609, 606, 607, 608 and 371; SEQ ID NOs: 610, 609, 611, 607, 608 and 371; SEQ ID NOs: 612, 613, 614, 615, 616 and 379; SEQ ID NOs: 617, 618, 619, 620, 621 and 385; SEQ ID NOs: 966, 967, 968, 969, 970 and 931; SEQ ID NOs: 971, 972, 973, 974, 975 and 937; SEQ ID NOs: 976, 977, 978, 941, 979 and 943; or SEQ ID NOs: 980, 981, 982, 983, 984 and 949.

[0234] In one embodiment, a polynucleotide described herein encodes a heavy chain variable region and a heavy chain targeting an HIV antigen (e.g., HIV gp120) comprising the amino acid sequences set forth in Table E. In various embodiments, the polynucleotide or polynucleotides encode a second VH and a second VL, the second VH and the second VL comprising amino acid sequences that are at least 80%, at least 85%, at least 90%, at least 91%, at least 92%, at least 93%, at least 94%, at least 95%, at least 96%, at least 97%, at least 98%, at least 99% identical, or are 100% identical, to the amino acid sequences set forth, respectively: SEQ ID NOs: 622 and 623; SEQ ID NOs: 624 and 625; SEQ ID NOs: 624 and 626; SEQ ID NOs: 627 and 628; SEQ ID NOs: 629 and 630; SEQ ID NOs: 631 and 632; SEQ ID NOs: 633 and 634; SEQ ID NOs: 635 and 636; SEQ ID NOs: 637 and 638; SEQ ID NOs: 639 and 640; SEQ ID NOs: 641 and 642; SEQ ID NOs: 643 and 644; SEQ ID NOs: 645 and 646; SEQ ID NOs: 647 and 648; SEQ ID NOs: 649 and 650; SEQ ID NOs: 651 and 652; SEQ ID NOs: 653 and 654; SEQ ID NOs: 655 and 656; SEQ ID NOs: 657 and 658; SEQ ID NOs: 659 and 660; SEQ ID NOs: 661 and 662; SEQ ID NOs: 663 and 664; SEQ ID NOs: 665 and 666; SEQ ID NOs: 667 and 668; SEQ ID NOs: 669 and 670; SEQ ID NOs:671 and 672; SEQ ID NOs:673 and 670; SEQ ID NOs: 674 and 675; SEQ ID NOs: 676 and 677; SEQ ID NOs: 678 and 679; SEQ ID NOs: 680 and 681; SEQ ID NOs: 682 and 683; SEQ ID NOs: 684 and 685; SEQ ID NOs: 686 and 687; SEQ ID NOs: 688 and 689; SEQ ID NOs: 690 and 691; SEQ ID NOs: 692 and 693; SEQ ID NOs: 694 and 695; SEQ ID NOs: 985 and 986; SEQ ID NOs: 987 and 988; SEQ ID NOs: 989 and 990; or SEQ ID NOs: 991 and 992.

[0235] In some embodiments, the polynucleotide or polynucleotides encode a first Fc region and a second Fc region, as set forth in Table F. In some embodiments, the polynucleotide or polynucleotides encode a first Fc region and a second Fc region, comprising amino acid sequences that are at least 80%, at least 85%, at least 90%, at least 91%, at least 92%, at least 93%, at least 94%, at least 95%, at least 96%, at least 97%, at least 98%, at least 99% identical, or are 100% identical, to the amino acid sequences set forth, respectively: SEQ ID NOs.: 696 and 697; SEQ ID NOs.: 697 and 696; SEQ ID NOs.: 696 and 698; SEQ ID NOs.: 698 and 696; SEQ ID NOs.: 699 and 700; SEQ ID NOs.: 700 and 699; SEQ ID NOs.: 701 and 698; SEQ ID NOs.: 698 and 701; SEQ ID NOs.: 702 and 703; SEQ ID NOs.: 703 and 702; SEQ ID NOs.: 704 and 698; SEQ ID NOs.: 698 and 704; SEQ ID NOs.: 705 and 703; SEQ ID NOs.: 703 and 705; SEQ ID NOs.: 706 and 704; SEQ ID NOs.: 704 and 706; SEQ ID NOs.: 707 and 703; SEQ ID NOs.: 703 and 707; SEQ ID NOs.: 708 and 704; SEQ ID NOs.: 704 and 708; SEQ ID NOs.: 709 and 710; or SEQ ID NOs.: 710 and 709. In some embodiments, the polynucleotide or polynucleotides encode a first Fc region and a second Fc region, comprising amino acid sequences that are at least 80%, at least 85%, at least 90%, at least 91%, at least 92%, at least 93%, at least 94%, at least 95%, at least 96%, at least 97%, at least 98%, at least 99% identical, or are 100% identical, to the amino acid sequences set forth, respectively: SEQ ID NOs.: 703 and 705. In some embodiments, the polynucleotide or polynucleotides encode a first Fc region and a second Fc region, comprising amino acid sequences that are at least 95% identical to the amino acid sequences set forth, respectively: SEQ ID NOs.: 703 and 705. In some embodiments, the polynucleotide or polynucleotides encode a first Fc region and a second Fc region, comprising amino acid sequences that are at least 99% identical to the amino acid sequences set forth, respectively: SEQ ID NOs.: 703 and 705. In some embodiments, the polynucleotide or polynucleotides encode a first Fc region and a second Fc region, comprising amino acid sequences that are 100% identical to the amino acid sequences set forth, respectively: SEQ ID NOs.: 703 and 705.

[0236] In some embodiments, the polynucleotide or polynucleotides encode an unpaired heavy chain a Fab arm heavy chain and a Fab arm light chain as set forth in Table G. Illustrative polynucleotide sequences are provided in Table J. In some embodiments, the polynucleotide or polynucleotides encode an unpaired heavy chain a Fab arm heavy chain and a Fab arm light chain comprising amino acid sequences comprising amino acid sequences that are at least 80%, at least 85%, at least 90%, at least 91%, at least 92%, at least 93%, at least 94%, at least 95%, at least 96%, at least 97%, at least 98%, at least 99% identical, or is 100% identical, to the amino acid sequences set forth, respectively: SEQ ID NOs: 995, 996 and 997; SEQ ID NOs: 998, 999 and 1000; SEQ ID NOs: 1001, 1002 and 1003; SEQ ID NOs: 1004, 1005 and 1000; SEQ ID NOs: 1006, 1002 and 997; SEQ ID NOs: 1007, 1093 and 1000; SEQ ID NOs: 998, 1008 and 1000; SEQ ID NOs: 998, 1009 and 1000; SEQ ID NOs: 1010, 1011 and 1012; SEQ ID NOs: 1013, 1014 and 1015; SEQ ID NOs: 1016, 1017 and 1012; SEQ ID NOs: 1018, 1019 and 1012; SEQ ID NOs: 1018, 1020 and 1012; SEQ ID NOs: 1021, 1022 and 1023; or SEQ ID NOs: 1024, 1025 and 1023.

[0237] In some embodiments, the polynucleotide or polynucleotides encode an unpaired heavy chain a Fab arm heavy chain and a Fab arm light chain comprising amino acid sequences that are at least 80%, at least 85%, at least 90%, at least 91%, at least 92%, at least 93%, at least 94%, at least 95%, at least 96%, at least 97%, at least 98%, at least 99% identical, or is 100% identical, to the amino acid sequences set forth, respectively: SEQ ID NOs: 995, 996 and 997. In some embodiments, the polynucleotide or polynucleotides encode an unpaired heavy chain a Fab arm heavy chain and a Fab arm light chain comprising amino acid sequences that are at least 95% identical to the amino acid sequences set forth, respectively: SEQ ID NOs: 995, 996 and 997. In some embodiments, the polynucleotide or polynucleotides encode an unpaired heavy chain a Fab arm heavy chain and a Fab arm light chain comprising amino acid sequences that are at least 99% identical to the amino acid sequences set forth, respectively: SEQ ID NOs: 995, 996 and 997. In some embodiments, the polynucleotide or polynucleotides encode an unpaired heavy chain a Fab arm heavy chain and a Fab arm light chain comprising amino acid sequences that are 100% identical to the amino acid sequences set forth, respectively: SEQ ID NOs: 995, 996 and 997.

[0238] In some embodiments, the polynucleotide or polynucleotides encode an unpaired heavy chain a Fab arm heavy chain and a Fab arm light chain comprising amino acid sequences that are at least 80%, at least 85%, at least 90%, at least 91%, at least 92%, at least 93%, at least 94%, at least 95%, at least 96%, at least 97%, at least 98%, at least 99% identical, or is 100% identical, to the amino acid sequences set forth, respectively: SEQ ID NOs: 998, 999 and 1000. In some embodiments, the polynucleotide or polynucleotides encode an unpaired heavy chain a Fab arm heavy chain and a Fab arm light chain comprising amino acid sequences that are at least 95% identical to the amino acid sequences set forth, respectively: SEQ ID NOs: 998, 999 and 1000. In some embodiments, the polynucleotide or polynucleotides encode an unpaired heavy chain a Fab arm heavy chain and a Fab arm light chain comprising amino acid sequences that are at least 99% identical to the amino acid sequences set forth, respectively: SEQ ID NOs: 998, 999 and 1000. In some embodiments, the polynucleotide or polynucleotides encode an unpaired heavy chain a Fab arm heavy chain and a Fab arm light chain comprising amino acid sequences that are 100% identical to the amino acid sequences set forth, respectively: SEQ ID NOs: 998, 999 and 1000.

[0239] Also encompassed by this disclosure are polynucleotides encoding an anti-gp120 antigen binding molecule or antigen binding fragment thereof, or an anti-CD3 antigen binding domain or antigen binding fragment thereof, that have at least one of codon-biased sequences for improved expression in a desired host cell, replacement heterologous signal sequences, and reduced or eliminated mRNA instability elements. Methods to generate codon-biased nucleic acids can be carried out by adapting the methods described in, e.g., U.S. Pat. Nos. 5,965,726; 6,174,666; 6,291,664; 6,414,132; and 6,794,498. Preferred codon usage for expression of the multi-specific antigen binding molecules in desired host cells is provided, e.g., at kazusa.or.jp/codon/; and genscript.com/tools/codon-frequency-table.

[0240] As appropriate, in certain embodiments, the 3′-end of the polynucleotides encoding the multi-specific antigen binding molecules comprises one or multiple tandem stop codons, e.g., two or more tandem TAG (“amber”), TAA (“ochre”) or TGA (“opal” or “umber”) stop codons. The multiple tandem stop codons can be the same or different.

TABLE J
polynucleotide encoding three chains of illustrative CD3/gp120-targeting bi-specific
binding molecules

| Ab | | | |
|---|---|---|---|
| name | unpaired HC | Fab Arm - HC | Fab Arm - LC |
| 430 | SEQ ID NO: 995 | SEQ ID NO: 996 | SEQ ID NO: 997 |
| hCD4 | AAGAAAGTGGTGTACGGCAAAAAGGGCGACACC | GAGGTGCAGCTGGTGGAATCTGGCGGAGGATTG | CAAGCTGTTGTGACAC |
| D1.22 | GTGGAACTGACCTGTACCGCCAGCCAGAAGAAG | GTTCAGCCTGGCGGCTCTCTGAGACTGTCTTGT | AAGAGCCCAGCCTGAC |
| Fc | AACATCCAGTTCCACTGGAAGAACTCCAACCAG | GCCGCTTCTGGCTTCACCTTCAACACCTACGCC | AGTGTCTCCTGGCGGA |
| AAS+ W + | ATCAAGATCCTGGGCAACCAGGGCAGCTTCCTG | ATGAACTGGGTCCGACAGGCTCCTGGCAAAGGC | ACAGTGACACTGACCT |
| YTE/ | ACCAAGGGACCTTCCAAGCTGAACGACAGAGTG | CTGGAATGGGTCGGACGGATCCGGTCCAAGTAC | GTGGATCTTCTACAGG |
| huSP3 | GACTCCAGACGGTCCCTGTGGGACCAGGGCAAC | AACAATTACGCCACCTACTACGCCGACTCCGTG | CGCCGTGACAACCGGC |
| 4.39.13 | TTTCCACTGATCATCAAGAACCTGAAGCCTGAG | AAGAGCAGATTCACCATCTCTCGGGACGACTCC | CACTATGCTAATTGGG |
| AAS + | GACTCCGACACCTACATCTGCGAGGTGGAAGAT | AAGAACTCCCTGTACCTGGAGATGAACAGCCTG | TGCAGCAGAAACCCGG |
| SAV + R | CAGAAAGAAGAGGTGCAGCTGGTCGTCGTCGGA | CGGACCGAGGATACCGCCGTGTACTATTGTGTG | ACAGGCCCCTAGAGGA |
| | GGATCTGACAAGACCCACACCTGTCCTCCATGT | CGGCACGGCAACTTCGGCCACTCCTATGTGTCT | CTGATCGGCGGAACAT |
| | CCTGCTCCAGAAGCTGCTGGCGGCCCTTCTGTG | TGGTTTGCCTACTGGGGCCAGGGCACACTGGTC | CTAATAGAGCCCCTGG |
| | TTCCTGTTTCCTCCAAAGCCTAAGGACACCCTG | ACAGTTTCTTCCGCCTCTACAAAGGGCCCTAGT | CGTGCCAGCCAGATTT |
| | TACATCACCCGCGAGCCTGAAGTGACCTGTGTG | GTGTTCCCTCTGGCTCCCAGCAGCAAGTCTACA | TCTGGATCTCTGCTCG |
| | GTGGTGGATGTGTCCCACGAGGACCCCGAAGTG | TCTGGCGGAACAGCCGCTCTGGGCTGCCTGGTC | GAGGCAAGGCCGCTCT |
| | AAGTTCAATTGGTACGTGGACGGCGTGGAAGTG | AAGGATTACTTTCCCGAGCCTGTGACCGTGTCC | GACAATTTCTGGCGCC |
| | CACAACGCCAAGACCAAGCCTAGAGAGGAACAG | TGGAATTCTGGCGCTCTGACAAGCGGCGTGCAC | CAGCCAGAGGATGAGG |
| | TACAACAGCACCTACAGAGTGGTGTCCGTGCTG | ACCTTTCCAGCTGTGCTGCAAAGCAGCGGCCTG | CCGAGTATTATTGTGC |
| | ACCGTGCTGCACCAGGATTGGCTGAACGGCAAA | TACTCTCTGAGCAGCGTGGTCACAGTGCCTAGC | CCTGTGGTACAGCAAC |
| | GAGTACAAGTGCAAGGTGTCCAACAAGGCCCTG | TCTAGCCTGGGCACCCAGACCTACATCTGCAAT | AGATGGGTGTTCGGCG |
| | CCTGCCAGCATCGAGAAAACCATCAGCAAGGCC | GTGAACCACAAGCCTAGCAACACCAAGGTGGAC | GAGGCACCAAACTGAC |
| | AAGGGCCAGCCTAGGGAACCCCAGGTTTACACA | AAGAAGGTGGAACCCAAGAGCTGCGACAAGACC | AGTGCTGGGACAACCT |
| | CTGCCTCCAAGCCGGGAAGAGATGACCAAGAAC | CACACCTGTCCTCCATGTCCTGCTCCAGAAGCT | AAGGCTGCCCCTAGCG |
| | CAGGTGTCCCTGTGGTGCCTCGTGAAGGGCTTC | GCTGGCGGCCCTTCCGTGTTTCTGTTCCCTCCA | TGACACTGTTTCCTCC |
| | TACCCTTCCGATATCGCCGTGGAATGGGAGAGC | AAGCCTAAGGACACCCTGATGATCAGCAGAACC | AAGCTCTGAGGAACTC |
| | AATGGCCAGCCTGAGAACAACTACAAGACAACC | CCTGAAGTGACCTGCGTGGTGGTGGATGTGTCC | CAGGCCAACAAGGCCA |
| | CCTCCTGTGCTGGACAGCGACGGCTCATTCTTC | CACGAGGATCCCGAAGTGAAGTTCAATTGGTAC | CACTCGTGTGCCTGAT |
| | CTGTACAGCAAGCTGACAGTGGACAAGTCCAGA | GTGGACGGCGTGGAAGTGCACAACGCCAAGACC | CAGCGATTTTTACCCT |
| | TGGCAGCAGGGCAACGTGTTCAGCTGCAGCGTG | AAGCCTAGAGAGGAACAGTACAACAGCACCTAC | GGCGCTGTGACAGTGG |
| | ATGCACGAGGCCCTGCACAACCACTACACCCAG | AGAGTGGTGTCCGTGCTGACCGTGCTGCACCAG | CCTGGAAGGCTGATAG |
| | AAGTCCCTGAGCCTGTCTCCTGGCAAA | GATTGGCTGAACGGCAAAGAGTACAAGTGCAAG | CTCTCCTGTGAAAGCC |
| | | GTGTCCAACAAGGCCCTGCCTGCCAGCATCGAG | GGCGTGGAAACCACCA |
| | | AAAACCATCAGCAAGGCCAAGGGCCAGCCTAGG | CACCTAGCAAGCAGAG |
| | | GAACCCCAGGTTTACACACTGCCTCCAAGCCGG | CAACAACAAATACGCC |
| | | GAAGAGATGACCAAGAACCAGGTGTCCCTGAGC | GCCAGCAGCTACCTGA |
| | | TGTGCCGTGAAGGGCTTCTACCCTTCCGATATC | GCCTGACACCTGAGCA |
| | | GCCGTGGAATGGGAGAGCAATGGCCAGCCTGAG | GTGGAAGTCCCACAGA |
| | | AACAACTACAAGACAACCCCTCCTGTGCTGGAC | TCCTACAGCTGCCAAG |
| | | AGCGACGGCTCATTCTTCCTGGTGTCCAAGCTG | TGACCCACGAGGGCAG |
| | | ACAGTGGACAAGTCCAGATGGCAGCAGGGCAAC | CACCGTGGAAAAAACA |
| | | GTGTTCAGCTGCAGCGTGATGCACGAGGCCCTG | GTGGCCCCTACCGAGT |
| | | CACAACCGGTACACCCAGAAGTCCCTGTCTCTG | GCAGC |
| | | AGCCCCGGCAAA | |
| 431 | SEQ ID NO: 998 | SEQ ID NO: 999 | SEQ ID NO: 1000 |
| hCD4 | AAAAAGGTGGTGTACGGCAAGAAGGGCGACACC | GAGGTGCAGCTGGTGGAATCTGGCGGAGGATTG | CAGGCCGTGGTCACCC |
| D1.22 | GTCGAGCTGACCTGTACCGCCTCTCAGAAGAAG | GTTCAGCCTGGCGGCTCTCTGAGACTGTCTTGT | AAGAGCCTAGCCTGAC |
| Fc | AACATCCAGTTCCACTGGAAGAACTCCAACCAG | GCCGCTTCTGGCTTCACCTTCAACACCTACGCT | AGTTTCTCCTGGCGGC |
| AAS + W + | ATCAAGATCCTGGGCAACCAGGGCAGCTTCCTG | ATGAACTGGGTCCGACAGGCCCCTGGCAAAGGA | ACCGTGACACTGACCT |
| YTE/ | ACCAAGGGACCTTCCAAGCTGAACGACAGAGTG | CTGGAATGGGTCGGACGGATCCGGTCCAAGTAC | GTGGATCTTCTACCGG |
| huSP3 | GACTCCAGACGGTCCCTGTGGGACCAGGGCAAC | AACAACTACGCCACCTACTACGCCGACTCCGTG | CGCTGTGACCACCGGC |
| 4.39.13 | TTTCCACTGATCATCAAGAACCTGAAGCCTGAG | AAGTCCCGGTTCACCATCTCTCGGGACGACTCC | CACTACGCTAATTGGG |
| AAS + | GACTCCGACACCTACATCTGCGAGGTGGAAGAT | AAGAACTCCCTGTACCTGGAAATGAACAGCCTG | TGCAGCAGAAGCCTGG |
| SAV + R | CAGAAAGAAGAGGTGCAGCTGGTCGTCGTCGGC | CGGACCGAGGACACCGCCGTGTATTATTGTGTG | ACAGGCTCCCAGAGGA |
| | GGCTCTGATAAGACCCATACCTGTCCTCCATGT | CGGCACGGCAACTTCGGCCACTCCTATGTGTCT | CTGATCGGCGGCACCT |
| | CCTGCTCCAGAAGCTGCTGGCGGCCCTTCCGTG | TGGTTTGCCTACTGGGGCCAGGGCACACTGGTC | CTAATAGAGCACCTGG |
| | TTTCTGTTCCCTCCAAAGCCTAAGGACACCCTG | ACAGTTTCTTCCGCCTCCACCAAGGGACCCAGC | CGTGCCAGCCAGATTC |
| | TACATCACCCGCGAGCCTGAAGTGACCTGCGTG | GTTTTCCCTCTGGCTCCATCCTCCAAGTCTACC | TCCGGATCTCTGCTTG |
| | GTGGTGGATGTGTCTCACGAGGACCCCGAAGTG | TCTGGCGGAACAGCTGCTCTGGGCTGCCTGGTC | GCGGAAAGGCCGCTCT |
| | AAGTTCAATTGGTACGTGGACGGCGTGGAAGTG | AAGGACTACTTTCCTGAGCCTGTGACCGTGTCC | GACAATCTCTGGTGCT |
| | CACAACGCCAAGACCAAGCCTAGAGAGGAACAG | TGGAACTCTGGCGCTCTGACATCTGGCGTGCAC | CAGCCTGAGGACGAGG |
| | TACAACTCCACCTACAGAGTGGTGTCCGTGCTG | ACCTTTCCAGCTGTGCTGCAGTCCTCCGGCCTG | CCGAGTACTATTGTGC |
| | ACCGTGCTGCACCAGGATTGGCTGAACGGCAAA | TACTCTCTGTCCTCTGTCGTGACCGTGCCTTCC | CCTGTGGTACTCCAAC |
| | GAGTACAAGTGCAAGGTGTCCAACAAGGCCCTG | AGCTCTCTGGGAACCCAGACCTACATCTGCAAT | AGATGGGTGTTCGGCG |
| | CCTGCCTCCATCGAAAAGACCATCTCCAAGGCC | GTGAACCACAAGCCTTCCAACACCAAGGTGGAC | GAGGCACCAAGCTGAC |
| | AAGGGCCAGCCTAGGGAACCCCAGGTTTACACC | AAGAAGGTGGAACCCAAGTCCTGCGACAAGACC | AGTTCTGGGACAGCCT |
| | CTGCCACCTAGCCGGGAAGAGATGACCAAGAAC | CACACCTGTCCTCCATGTCCTGCTCCAGAAGCT | AAGGCTGCCCCTTCCG |
| | CAGGTGTCACTGTGGTGCCTGGTCAAGGGCTTC | GCTGGCGGCCCTTCCGTGTTTCTGTTCCCTCCA | TGACTCTGTTCCCTCC |
| | TACCCCTCTGATATCGCCGTGGAATGGGAGAGC | AAGCCTAAGGACACCCTGATGATCTCTCGGACC | ATCCTCTGAGGAACTG |
| | AATGGCCAGCCTGAGAACAACTACAAGACCACA | CCTGAAGTGACCTGCGTGGTGGTGGATGTGTCT | CAGGCCAACAAGGCTA |
| | CCTCCTGTGCTGGACAGCGACGGCTCATTCTTC | CACGAGGATCCCGAAGTGAAGTTCAATTGGTAC | CCCTCGTGTGCCTGAT |
| | CTGTACAGCAAGCTGACAGTGGACAAGTCCAGA | GTGGACGGCGTGGAAGTGCACAACGCCAAGACC | CTCCGACTTTTACCCT |
| | TGGCAGCAGGGCAACGTGTTCTCCTGCTCCGTG | AAGCCTAGAGAGGAACAGTACAACTCCACCTAC | GGCGCCGTGACCGTGG |
| | ATGCACGAGGCCCTGCACAATCACTACACCCAG | AGAGTGGTGTCCGTGCTGACCGTGCTGCACCAG | CTTGGAAGGCTGATAG |
| | AAGTCCCTGTCTCTGTCCCCTGGCAAA | GATTGGCTGAACGGCAAAGAGTACAAGTGCAAG | TTCTCCTGTGAAGGCC |
| | | GTGTCCAACAAGGCCCTGCCTGCCTCCATCGAA | GGCGTGGAAACCACCA |
| | | AAGACCATCTCCAAGGCCAAGGGCCAGCCTAGG | CACCTAGCAAGCAGTC |
| | | GAACCCCAGGTTTACACCCTGCCACCTAGCCGG | CAACAACAAATACGCC |
| | | GAAGAGATGACCAAGAACCAGGTGTCCCTGTCC | GCCTCCTCCTACCTGT |
| | | TGTGCCGTGAAGGGCTTCTACCCTTCCGATATC | CTCTGACCCCTGAACA |
| | | GCCGTGGAATGGGAGAGCAATGGCCAGCCTGAG | GTGGAAGTCCCACCGG |
| | | AACAACTACAAGACAACCCCTCCTGTGCTGGAC | TCCTACAGCTGCCAAG |
| | | TCCGACGGCTCATTCTTCCTGGTGTCCAAGCTG | TGACCCATGAGGGCTC |
| | | ACAGTGGACAAGTCTAGATGGCAGCAGGGCAAC | CACCGTGGAAAAGACA |
| | | GTGTTCTCCTGCTCCGTGATGCACGAGGCCCTG | GTGGCCCCTACCGAGT |
| | | CACAACAGATACACCCAGAAGTCCCTGTCTCTG | GCTCT |
| | | AGCCCCGGAAAA | |
| 432 | SEQ ID NO: 1001 | SEQ ID NO: 1002 | SEQ ID NO: 1003 |
| hCD4 | AAGAAAGTGGTGTACGGCAAAAAGGGCGACACC | GAGGTGCAGCTGGTGGAATCTGGCGGAGGATTG | CAAGCTGTTGTGACAC |
| D1.22 | GTGGAACTGACCTGTACCGCCAGCCAGAAGAAG | GTTCAGCCTGGCGGCTCTCTGAGACTGTCTTGT | AAGAGCCCAGCCTGAC |
| Fc | AACATCCAGTTCCACTGGAAGAACTCCAACCAG | GCCGCTTCTGGCTTCACCTTCAACACCTACGCC | AGTGTCTCCTGGCGGA |
| AAS + | ATCAAGATCCTGGGCAACCAGGGCAGCTTCCTG | ATGAACTGGGTCCGACAGGCTCCTGGCAAAGGC | ACAGTGACACTGACCT |
| SAV + R/ | ACCAAGGGACCTTCCAAGCTGAACGACAGAGTG | CTGGAATGGGTCGGACGGATCCGGTCCAAGTAC | GTGGATCTTCTACAGG |
| huSP3 | GACTCCAGACGGTCCCTGTGGGACCAGGGCAAC | AACAATTACGCCACCTACTACGCCGACTCCGTG | CGCCGTGACAACCGGC |
| 4.3.13 | TTTCCACTGATCATCAAGAACCTGAAGCCTGAG | AAGGGCAGATTCACCATCTCTCGGGACGACTCC | CACTATGCTAATTGGG |
| AAS + W + | GACTCCGACACCTACATCTGCGAGGTGGAAGAT | AAGAACTCCCTGTACCTGCAGATGAACAGCCTG | TGCAGCAGAAACCCGG |
| YTE | CAGAAAGAAGAGGTGCAGCTGGTCGTCGTCGGA | CGGACCGAGGATACCGCCGTGTACTATTGTGTG | ACAGGCCCCTAGAGGA |
| | GGATCTGACAAGACCCACACCTGTCCTCCATGT | CGGCACGGCAACTTCGGCCACTCCTATGTGTCT | CTGATCGGCGGAACAT |
| | CCTGCTCCAGAAGCTGCTGGCGGCCCTTCCGTG | TGGTTTGCCTACTGGGGCCAGGGCACACTGGTC | CTAATAGAGCCCCTGG |
| | TTTCTGTTCCCTCCAAAGCCTAAGGACACCCTG | ACAGTTTCTTCCGCTAGCACCAAGGGCCCCTCC | CGTGCCAGCCAGATTT |
| | ATGATCAGCAGAACCCCTGAAGTGACCTGCGTG | GTGTTTCCACTGGCTCCTAGCAGCAAGAGCACA | TCTGCCGAGTATTATT |
| | GTGGTGGATGTGTCCCACGAGGATCCCGAAGTG | AGCGGAGGAACAGCCGCTCTGGGCTGTCTGGTC | GTGCCCTGTGGTACAG |
| | AAGTTCAATTGGTACGTGGACGGCGTGGAAGTG | AAGGACTACTTTCCCGAGCCTGTGACCGTGTCC | CAACAGATGGGTGTTC |
| | CACAACGCCAAGACCAAGCCTAGAGAGGAACAG | TGGAATTCTGGCGCTCTGACAAGCGGCGTGCAC | GGCGGAGGCACCAAAC |
| | TACAACAGCACCTACAGAGTGGTGTCCGTGCTG | ACCTTTCCAGCTGTGCTGCAAAGCAGCGGCCTG | TGACAGTGCTGGGACA |
| | ACCGTGCTGCACCAGGATTGGCTGAACGGCAAA | TACTCTCTGAGCAGCGTGGTCACAGTGCCAAGC | ACCTAAGGCTGCCCCT |
| | GAGTACAAGTGCAAGGTGTCCAACAAGGCCCTG | TCTAGCCTGGGCACCCAGACCTACATCTGCAAT | AGCGTGACACTGTTTC |
| | CCTGCCAGCATCGAGAAAACCATCAGCAAGGCC | GTGAACCACAAGCCTAGCAACACCAAGGTGGAC | CTCCAAGCTCTGAGGA |
| | AAGGGCCAGCCTAGGGAACCCCAGGTTTACACA | AAGAAGGTGGAACCCAAGAGCTGCGACAAGACC | ACTCCAGGCCAACAAG |
| | CTGCCTCCAAGCCGGGAAGAGATGACCAAGAAC | CACACCTGTCCTCCATGTCCTGCTCCAGAAGCT | GCCACACTCGTGTGCC |
| | CAGGTGTCCCTGAGCTGTGCCGTGAAGGGCTTC | GCTGGCGGCCCTTCTGTGTTCCTGTTTCCTCCA | TGATCAGCGATTTTTA |
| | TACCCTTCCGATATCGCCGTGGAATGGGAGAGC | AAGCCTAAGGACACCCTGTACATCACCCGCGAG | CCCTGGCGCTGTGACA |
| | AATGGCCAGCCTGAGAACAACTACAAGACAACC | CCTGAAGTGACCTGTGTGGTGGTGGATGTGTCC | GTGGCCTGGAAGGCTG |
| | CCTCCTGTGCTGGACAGCGACGGCTCATTCTTC | CACGAGGACCCCGAAGTGAAGTTCAATTGGTAC | ATAGCTCTCCTGTGAA |
| | CTGGTGTCCAAGCTGACAGTGGACAAGTCCAGA | GTGGACGGCGTGGAAGTGCACAACGCCAAGACC | AGCCGGCGTGGAAACC |
| | TGGCAGCAGGGCAACGTGTTCAGCTGCAGCGTG | AAGCCTAGAGAGGAACAGTACAACAGCACCTAC | ACCACACCTAGCAAGC |
| | ATGCACGAGGCCCTGCACAACCGGTACACCCAG | AGAGTGGTGTCCGTGCTGACCGTGCTGCACCAG | AGAGCAACAACAAATA |
| | AAGTCCCTGTCTCTGAGCCCCGGCAAA | GATTGGCTGAACGGCAAAGAGTACAAGTGCAAG | CGCCGCCAGCAGCTAC |
| | | GTGTCCAACAAGGCCCTGCCTGCCAGCATCGAG | CTGAGCCTGACACCTG |
| | | AAAACCATCAGCAAGGCCAAGGGCCAGCCTAGG | AGCAGTGGAAGTCCCA |
| | | GAACCCCAGGTTTACACACTGCCTCCAAGCCGG | CAGATCCTACAGCTGC |
| | | GAAGAGATGACCAAGAACCAGGTGTCCCTGTGG | CAAGTGACCCACGAGG |
| | | TGCCTCGTGAAGGGCTTCTACCCTTCCGATATC | GCAGCACCGTGGAAAA |
| | | GCCGTGGAATGGGAGAGCAATGGCCAGCCTGAG | AACAGTGGCCCCTACC |
| | | AACAACTACAAGACAACCCCTCCTGTGCTGGAC | GAGTGCAGC |
| | | AGCGACGGCTCATTCTTCCTGTACAGCAAGCTG | |
| | | ACAGTGGACAAGTCCAGATGGCAGCAGGGCAAC | |
| | | GTGTTCAGCTGCAGCGTGATGCACGAGGCCCTG | |
| | | CACAACCACTACACCCAGAAGTCCCTGAGCCTG | |
| | | TCTCCTGGCAAA | |
| 433 | SEQ ID NO: 1004 | SEQ ID NO: 1005 | SEQ ID NO: 1000 |
| hCD4 | AAAAAGGTGGTGTACGGCAAGAAGGGCGACACC | GAGGTGCAGCTGGTGGAATCTGGCGGAGGATTG | CAGGCCGTGGTCACCC |
| D1.22 | GTCGAGCTGACCTGTACCGCCTCTCAGAAGAAG | GTTCAGCCTGGCGGCTCTCTGAGACTGTCTTGT | AAGAGCCTAGCCTGAC |
| Fc | AACATCCAGTTCCACTGGAAGAACTCCAACCAG | GCCGCTTCTGGCTTCACCTTCAACACCTACGCT | AGTTTCTCCTGGCGGC |
| AAS + | ATCAAGATCCTGGGCAACCAGGGCAGCTTCCTG | ATGAACTGGGTCCGACAGGCCCCTGGCAAAGGA | ACCGTGACACTGACCT |
| SAV + R/ | ACCAAGGGACCTTCCAAGCTGAACGACAGAGTG | CTGGAATGGGTCGGACGGATCCGGTCCAAGTAC | GTGGATCTTCTACCGG |
| huSP3 | GACTCCAGACGGTCCCTGTGGGACCAGGGCAAC | AACAACTACGCCACCTACTACGCCGACTCCGTG | CGCTGTGACCACCGGC |
| 4.3.13 | TTTCCACTGATCATCAAGAACCTGAAGCCTGAG | AAGGGCAGATTCACCATCTCTCGGGACGACTCC | CACTACGCTAATTGGG |
| AAS + | GACTCCGACACCTACATCTGCGAGGTGGAAGAT | AAGAACTCCCTGTACCTGCAGATGAACAGCCTG | TGCAGCAGAAGCCTGG |
| W + YTE | CAGAAAGAAGAGGTGCAGCTGGTCGTCGTCGGC | CGGACCGAGGATACCGCCGTGTACTATTGTGTG | ACAGGCTCCCAGAGGA |
| | GGCTCTGATAAGACCCATACCTGTCCTCCATGT | CGGCACGGCAACTTCGGCCACTCCTATGTGTCT | CTGATCGGCGGCACCT |
| | CCTGCTCCAGAAGCTGCTGGCGGCCCTTCCGTG | TGGTTTGCCTACTGGGGCCAGGGCACACTGGTC | CTAATAGAGCACCTGG |
| | TTTCTGTTCCCTCCAAAGCCTAAGGACACCCTG | ACAGTTTCTTCCGCCTCCACCAAGGGACCCAGC | CGTGCCAGCCAGATTC |
| | ATGATCTCTCGGACCCCTGAAGTGACCTGCGTG | GTTTTCCCTCTGGCTCCATCCTCCAAGTCTACC | TCCGGATCTCTGCTTG |
| | GTGGTGGATGTGTCTCACGAGGATCCCGAAGTG | TCTGGCGGAACATGGAACTCTGGCGCTCTGACA | GCGGAAAGGCCGCTCT |
| | AAGTTCAATTGGTACGTGGACGGCGTGGAAGTG | TCTGGCGTGCACACCTTTCCAGCTGTGCTGCAG | GACAATCTCTGGTGCT |
| | CACAACGCCAAGACCAAGCCTAGAGAGGAACAG | TCCTCCGGCCTGTACTCTCTGTCCTCTGTCGTG | CAGCCTGAGGACGAGG |
| | TACAACTCCACCTACAGAGTGGTGTCCGTGCTG | ACCGTGCCTTCCAGCTCTCTGGGAACCCAGACC | CCGAGTACTATTGTGC |
| | ACCGTGCTGCACCAGGATTGGCTGAACGGCAAA | TACATCTGCAATGTGAACCACAAGCCTTCCAAC | CCTGTGGTACTCCAAC |
| | GAGTACAAGTGCAAGGTGTCCAACAAGGCCCTG | ACCAAGGTGGACAAGAAGGTGGAACCCAAGTCC | AGATGGGTGTTCGGCG |
| | CCTGCCTCCATCGAAAAGACCATCTCCAAGGCC | TGCGACAAGACCCACACCTGTCCTCCATGTCCT | GAGGCACCAAGCTGAC |
| | AAGGGCCAGCCTAGGGAACCCCAGGTTTACACC | GCTCCAGAAGCTGCTGGCGGCCCTTCCGTGTTT | AGTTCTGGGACAGCCT |
| | CTGCCACCTAGCCGGGAAGAGATGACCAAGAAC | CTGTTCCCTCCAAAGCCTAAGGACACCCTGTAC | AAGGCTGCCCCTTCCG |
| | CAGGTGTCCCTGTCCTGTGCCGTGAAGGGCTTC | ATCACCCGCGAGCCTGAAGTGACCTGCGTGGTG | TGACTCTGTTCCCTCC |
| | TACCCTTCCGATATCGCCGTGGAATGGGAGAGC | GTGGATGTGTCTCACGAGGACCCCGAAGTGAAG | ATCCTCTGAGGAACTG |
| | AATGGCCAGCCTGAGAACAACTACAAGACCACA | TTCAATTGGTACGTGGACGGCGTGGAAGTGCAC | CAGGCCAACAAGGCTA |
| | CCTCCTGTGCTGGACAGCGACGGCTCATTCTTC | AACGCCAAGACCAAGCCTAGAGAGGAACAGTAC | CCCTCGTGTGCCTGAT |
| | CTGGTGTCTAAGCTGACAGTGGACAAGTCCAGA | AACTCCACCTACAGAGTGGTGTCCGTGCTGACC | CTCCGACTTTTACCCT |
| | TGGCAGCAGGGCAACGTGTTCTCCTGCTCCGTG | GTGCTGCACCAGGATTGGCTGAACGGCAAAGAG | GGCGCCGTGACCGTGG |
| | ATGCACGAGGCCCTGCACAACAGATACACCCAG | TACAAGTGCAAGGTGTCCAACAAGGCCCTGCCT | CTTGGAAGGCTGATAG |
| | AAGTCCCTGAGCCTGTCTCCTGGCAAA | GCCTCCATCGAAAAGACCATCTCCAAGGCCAAG | TTCTCCTGTGAAGGCC |
| | | GGCCAGCCTAGGGAACCCCAGGTTTACACCCTG | GGCGTGGAAACCACCA |
| | | CCACCTAGCCGGGAAGAGATGACCAAGAACCAG | CACCTAGCAAGCAGTC |
| | | GTGTCCCTGTGGTGCCTGGTTAAGGGCTTCTAC | CAACAACAAATACGCC |
| | | CCCTCCGATATCGCCGTGGAATGGGAGTCTAAT | GCCTCCTCCTACCTGT |
| | | GGCCAGCCTGAGAACAACTACAAGACAACCCCT | CTCTGACCCCTGAACA |
| | | CCTGTGCTGGACTCCGACGGCTCATTCTTCCTG | GTGGAAGTCCCACCGG |
| | | TACTCCAAGCTGACAGTGGACAAGTCCAGATGG | TCCTACAGCTGCCAAG |
| | | CAGCAGGGCAACGTGTTCTCCTGCTCCGTGATG | TGACCCATGAGGGCTC |
| | | CACGAGGCCCTGCACAATCACTACACCCAGAAG | CACCGTGGAAAAGACA |
| | | TCCCTGTCTCTGAGCCCTGGCAAG | GTGGCCCCTACCGAGT |
| | | | GCTCT |
| 434 | SEQ ID NO: 1006 | SEQ ID NO: 1002 | SEQ ID NO: 997 |
| hCD4 | AAGAAAGTGGTGTACGGCAAAAAGGGCGACACC | GAGGTGCAGCTGGTGGAATCTGGCGGAGGATTG | CAAGCTGTTGTGACAC |
| D1.22 | GTGGAACTGACCTGTACCGCCAGCCAGAAGAAG | GTTCAGCCTGGCGGCTCTCTGAGACTGTCTTGT | AAGAGCCCAGCCTGAC |
| Fc | AACATCCAGTTCCACTGGAAGAACTCCAACCAG | GCCGCTTCTGGCTTCACCTTCAACACCTACGCC | AGTGTCTCCTGGCGGA |
| AAS + | ATCAAGATCCTGGGCAACCAGGGCAGCTTCCTG | ATGAACTGGGTCCGACAGGCTCCTGGCAAAGGC | ACAGTGACACTGACCT |
| SAV + | ACCAAGGGACCTTCCAAGCTGAACGACAGAGTG | CTGGAATGGGTCGGACGGATCCGGTCCAAGTAC | GTGGATCTTCTACAGG |
| YTE/huS | GACTCCAGACGGTCCCTGTGGGACCAGGGCAAC | AACAATTACGCCACCTACTACGCCGACTCCGTG | CGCCGTGACAACCGGC |
| P34.3.13 | TTTCCACTGATCATCAAGAACCTGAAGCCTGAG | AAGGGCAGATTCACCATCTCTCGGGACGACTCC | CACTATGCTAATTGGG |
| AAS + W + | GACTCCGACACCTACATCTGCGAGGTGGAAGAT | AAGAACTCCCTGTACCTGCAGATGAACAGCCTG | TGCAGCAGAAACCCGG |
| YTE | CAGAAAGAAGAGGTGCAGCTGGTCGTCGTCGGA | CGGACCGAGGATACCGCCGTGTACTATTGTGTG | ACAGGCCCCTAGAGGA |
| | GGATCTGACAAGACCCACACCTGTCCTCCATGT | CGGCACGGCAACTTCGGCCACTCCTATGTGTCT | CTGATCGGCGGAACAT |
| | CCTGCTCCAGAAGCTGCTGGCGGCCCTTCCGTG | TGGTTTGCCTACTGGGGCCAGGGCACACTGGTC | CTAATAGAGCCCCTGG |
| | TTTCTGTTCCCTCCAAAGCCTAAGGACACCCTG | ACAGTTTCTTCCGCTAGCACCAAGGGCCCCTCC | CGTGCCAGCCAGATTT |
| | TACATCACCCGCGAGCCTGAAGTGACCTGCGTG | GTGTTTCCACTGGCTCCTAGCAGCAAGAGCACA | TCTGGATCTCTGCTCG |
| | GTGGTGGATGTGTCCCACGAGGATCCCGAAGTG | AGCGGAGGAACAGCCGCTCTGGGCTGTCTGGTC | GAGGCAAGGCCGCTCT |
| | AAGTTCAATTGGTACGTGGACGGCGTGGAAGTG | AAGGACTACTTTCCCGAGCCTGTGACCGTGTCC | GACAATTTCTGGCGCC |
| | CACAACGCCAAGACCAAGCCTAGAGAGGAACAG | TGGAATTCTGGCGCTCTGACAAGCGGCGTGCAC | CAGCCAGAGGATGAGG |
| | TACAACAGCACCTACAGAGTGGTGTCCGTGCTG | ACCTTTCCAGCTGTGCTGCAAAGCAGCGGCCTG | CCGAGTATTATTGTGC |
| | ACCGTGCTGCACCAGGATTGGCTGAACGGCAAA | TACTCTCTGAGCAGCGTGGTCACAGTGCCAAGC | CCTGTGGTACAGCAAC |
| | GAGTACAAGTGCAAGGTGTCCAACAAGGCCCTG | TCTAGCCTGGGCACCCAGACCTACATCTGCAAT | AGATGGGTGTTCGGCG |
| | CCTGCCAGCATCGAGAAAACCATCAGCAAGGCC | GTGAACCACAAGCCTAGCAACACCAAGGTGGAC | GAGGCACCAAACTGAC |
| | AAGGGCCAGCCTAGGGAACCCCAGGTTTACACA | AAGAAGGTGGAACCCAAGAGCTGCGACAAGACC | AGTGCTGGGACAACCT |
| | CTGCCTCCAAGCCGGGAAGAGATGACCAAGAAC | CACACCTGTCCTCCATGTCCTGCTCCAGAAGCT | AAGGCTGCCCCTAGCG |
| | CAGGTGTCCCTGAGCTGTGCCGTGAAGGGCTTC | GCTGGCGGCCCTTCTGTGTTCCTGTTTCCTCCA | TGACACTGTTTCCTCC |
| | TACCCTTCCGATATCGCCGTGGAATGGGAGAGC | AAGCCTAAGGACACCCTGTACATCACCCGCGAG | AAGCTCTGAGGAACTC |
| | AATGGCCAGCCTGAGAACAACTACAAGACAACC | CCTGAAGTGACCTGTGTGGTGGTGGATGTGTCC | CAGGCCAACAAGGCCA |
| | CCTCCTGTGCTGGACAGCGACGGCTCATTCTTC | CACGAGGACCCCGAAGTGAAGTTCAATTGGTAC | CACTCGTGTGCCTGAT |
| | CTGGTGTCCAAGCTGACAGTGGACAAGTCCAGA | GTGGACGGCGTGGAAGTGCACAACGCCAAGACC | CAGCGATTTTTACCCT |
| | TGGCAGCAGGGCAACGTGTTCAGCTGCAGCGTG | AAGCCTAGAGAGGAACAGTACAACAGCACCTAC | GGCGCTGTGACAGTGG |
| | ATGCACGAGGCCCTGCACAACCACTACACCCAG | AGAGTGGTGTCCGTGCTGACCGTGCTGCACCAG | CCTGGAAGGCTGATAG |
| | AAGTCCCTGTCTCTGAGCCCCGGCAAA | GATTGGCTGAACGGCAAAGAGTACAAGTGCAAG | CTCTCCTGTGAAAGCC |
| | | GTGTCCAACAAGGCCCTGCCTGCCAGCATCGAG | GGCGTGGAAACCACCA |
| | | AAAACCATCAGCAAGGCCAAGGGCCAGCCTAGG | CACCTAGCAAGCAGAG |
| | | GAACCCCAGGTTTACACACTGCCTCCAAGCCGG | CAACAACAAATACGCC |
| | | GAAGAGATGACCAAGAACCAGGTGTCCCTGTGG | GCCAGCAGCTACCTGA |
| | | TGCCTCGTGAAGGGCTTCTACCCTTCCGATATC | GCCTGACACCTGAGCA |
| | | GCCGTGGAATGGGAGAGCAATGGCCAGCCTGAG | GTGGAAGTCCCACAGA |
| | | AACAACTACAAGACAACCCCTCCTGTGCTGGAC | TCCTACAGCTGCCAAG |
| | | AGCGACGGCTCATTCTTCCTGTACAGCAAGCTG | TGACCCACGAGGGCAG |
| | | ACAGTGGACAAGTCCAGATGGCAGCAGGGCAAC | CACCGTGGAAAAAACA |
| | | GTGTTCAGCTGCAGCGTGATGCACGAGGCCCTG | GTGGCCCCTACCGAGT |
| | | CACAACCACTACACCCAGAAGTCCCTGAGCCTG | GCAGC |
| | | TCTCCTGGCAAA | |
| 435 | SEQ ID NO: 1007 | SEQ ID NO: 1093 | SEQ ID NO: 1000 |
| hCD4 | AAAAAGGTGGTGTACGGCAAGAAGGGCGACACC | GAGGTGCAGCTGGTGGAATCTGGCGGAGGATTG | CAGGCCGTGGTCACCC |
| D1.22 | GTCGAGCTGACCTGTACCGCCTCTCAGAAGAAG | GTTCAGCCTGGCGGCTCTCTGAGACTGTCTTGT | AAGAGCCTAGCCTGAC |
| Fc | AACATCCAGTTCCACTGGAAGAACTCCAACCAG | GCCGCTTCTGGCTTCACCTTCAACACCTACGCT | AGTTTCTCCTGGCGGC |
| AAS + | ATCAAGATCCTGGGCAACCAGGGCAGCTTCCTG | ATGAACTGGGTCCGACAGGCCCCTGGCAAAGGA | ACCGTGACACTGACCT |
| SAV + | ACCAAGGGACCTTCCAAGCTGAACGACAGAGTG | CTGGAATGGGTCGGACGGATCCGGTCCAAGTAC | GTGGATCTTCTACCGG |
| YTE/hus | GACTCCAGACGGTCCCTGTGGGACCAGGGCAAC | AACAACTACGCCACCTACTACGCCGACTCCGTG | CGCTGTGACCACCGGC |
| P34.3.13 | TTTCCACTGATCATCAAGAACCTGAAGCCTGAG | AAGGGCAGATTCACCATCTCTCGGGACGACTCC | CACTACGCTAATTGGG |
| AAS + W + | GACTCCGACACCTACATCTGCGAGGTGGAAGAT | AAGAACTCCCTGTACCTGCAGATGAACAGCCTG | TGCAGCAGAAGCCTGG |
| YTE | CAGAAAGAAGAGGTGCAGCTGGTCGTCGTCGGC | CGGACCGAGGATACCGCCGTGTACTATTGTGTG | ACAGGCTCCCAGAGGA |
| | GGCTCTGATAAGACCCATACCTGTCCTCCATGT | CGGCACGGCAACTTCGGCCACTCCTATGTGTCT | CTGATCGGCGGCACCT |
| | CCTGCTCCAGAAGCTGCTGGCGGCCCTTCCGTG | TGGTTTGCCTACTGGGGCCAGGGCACACTGGTC | CTAATAGAGCACCTGG |
| | TTTCTGTTCCCTCCAAAGCCTAAGGACACCCTG | ACAGTTTCTTCCGCCTCCACCAAGGGACCCAGC | CGTGCCAGCCAGATTC |
| | TACATCACCCGCGAGCCTGAAGTGACCTGCGTG | GTTTTCCCTCTGGCTCCATCCTCCAAGTCTACC | TCCGGATCTCTGCTTG |
| | GTGGTGGATGTGTCTCACGAGGACCCCGAAGTG | TCTGGCGGAACAGCTGCTCTGGGCTGCCTGGTC | GCGGAAAGGCCGCTCT |
| | AAGTTCAATTGGTACGTGGACGGCGTGGAAGTG | AAGGACTACTTTCCTGAGCCTGTGACCGTGTCC | GACAATCTCTGGTGCT |
| | CACAACGCCAAGACCAAGCCTAGAGAGGAACAG | TGGAACTCTGGCGCTCTGACATCTGGCGTGCAC | CAGCCTGAGGACGAGG |
| | TACAACTCCACCTACAGAGTGGTGTCCGTGCTG | ACCTTTCCAGCTGTGCTGCAGTCCTCCGGCCTG | CCGAGTACTATTGTGC |
| | ACCGTGCTGCACCAGGATTGGCTGAACGGCAAA | TACTCTCTGTCCTCTGTCGTGACCGTGCCTTCC | CCTGTGGTACTCCAAC |
| | GAGTACAAGTGCAAGGTGTCCAACAAGGCCCTG | AGCTCTCTGGGAACCCAGACCTACATCTGCAAT | AGATGGGTGTTCGGCG |
| | CCTGCCTCCATCGAAAAGACCATCTCCAAGGCC | GTGAACCACAAGCCTTCCAACACCAAGGTGGAC | GAGGCACCAAGCTGAC |
| | AAGGGCCAGCCTAGGGAACCCCAGGTTTACACC | AAGAAGGTGGAACCCAAGTCCTGCGACAAGACC | AGTTCTGGGACAGCCT |
| | CTGCCACCTAGCCGGGAAGAGATGACCAAGAAC | CACACCTGTCCTCCATGTCCTGCTCCAGAAGCT | AAGGCTGCCCCTTCCG |
| | CAGGTGTCCCTGTCCTGTGCCGTGAAGGGCTTC | GCTGGCGGCCCTTCCGTGTTTCTGTTCCCTCCA | TGACTCTGTTCCCTCC |
| | TACCCTTCCGATATCGCCGTGGAATGGGAGAGC | AAGCCTAAGGACACCCTGTACATCACCCGCGAG | ATCCTCTGAGGAACTG |
| | AATGGCCAGCCTGAGAACAACTACAAGACCACA | CCTGAAGTGACCTGCGTGGTGGTGGATGTGTCT | CAGGCCAACAAGGCTA |
| | CCTCCTGTGCTGGACAGCGACGGCTCATTCTTC | CACGAGGACCCCGAAGTGAAGTTCAATTGGTAC | CCCTCGTGTGCCTGAT |
| | CTGGTGTCTAAGCTGACAGTGGACAAGTCCAGA | GTGGACGGCGTGGAAGTGCACAACGCCAAGACC | CTCCGACTTTTACCCT |
| | TGGCAGCAGGGCAACGTGTTCTCCTGCTCCGTG | AAGCCTAGAGAGGAACAGTACAACTCCACCTAC | GGCGCCGTGACCGTGG |
| | ATGCACGAGGCCCTGCACAATCACTACACCCAG | AGAGTGGTGTCCGTGCTGACCGTGCTGCACCAG | CTTGGAAGGCTGATAG |
| | AAGTCCCTGAGCCTGTCTCCTGGCAAA | GATTGGCTGAACGGCAAAGAGTACAAGTGCAAG | TTCTCCTGTGAAGGCC |
| | | GTGTCCAACAAGGCCCTGCCTGCCTCCATCGAA | GGCGTGGAAACCACCA |
| | | AAGACCATCTCCAAGGCCAAGGGCCAGCCTAGG | CACCTAGCAAGCAGTC |
| | | GAACCCCAGGTTTACACCCTGCCACCTAGCCGG | CAACAACAAATACGCC |
| | | GAAGAGATGACCAAGAACCAGGTGTCCCTGTGG | GCCTCCTCCTACCTGT |
| | | TGCCTGGTTAAGGGCTTCTACCCCTCCGATATC | CTCTGACCCCTGAACA |
| | | GCCGTGGAATGGGAGTCTAATGGCCAGCCTGAG | GTGGAAGTCCCACCGG |
| | | AACAACTACAAGACAACCCCTCCTGTGCTGGAC | TCCTACAGCTGCCAAG |
| | | TCCGACGGCTCATTCTTCCTGTACTCCAAGCTG | TGACCCATGAGGGCTC |
| | | ACAGTGGACAAGTCCAGATGGCAGCAGGGCAAC | CACCGTGGAAAAGACA |
| | | GTGTTCTCCTGCTCCGTGATGCACGAGGCCCTG | GTGGCCCCTACCGAGT |
| | | CACAATCACTACACCCAGAAGTCCCTGTCTCTG | GCTCT |
| | | AGCCCTGGCAAG | |
| 436 | SEQ ID NO: 998 | SEQ ID NO: 1008 | SEQ ID NO: 1000 |
| hCD4 | AAAAAGGTGGTGTACGGCAAGAAGGGCGACACC | GAGGTGCAGCTGGTGGAATCTGGCGGAGGATTG | CAGGCCGTGGTCACCC |
| D1.22 | GTCGAGCTGACCTGTACCGCCTCTCAGAAGAAG | GTTCAGCCTGGCGGCTCTCTGAGACTGTCTTGT | AAGAGCCTAGCCTGAC |
| Fc | AACATCCAGTTCCACTGGAAGAACTCCAACCAG | GCCGCTTCTGGCTTCACCTTCAACACCTACGCT | AGTTTCTCCTGGCGGC |
| AAS + W + | ATCAAGATCCTGGGCAACCAGGGCAGCTTCCTG | ATGAACTGGGTCCGACAGGCCCCTGGCAAAGGA | ACCGTGACACTGACCT |
| YTE/ | ACCAAGGGACCTTCCAAGCTGAACGACAGAGTG | CTGGAATGGGTCGGACGGATCCGGTCCAAGTAC | GTGGATCTTCTACCGG |
| huSP3 | GACTCCAGACGGTCCCTGTGGGACCAGGGCAAC | AACAACTACGCCGCCTACTACGCCGACTCCGTG | CGCTGTGACCACCGGC |
| 4.40.13 | TTTCCACTGATCATCAAGAACCTGAAGCCTGAG | AAGTCCAGATTCACCATCTCTCGGGACGACTCC | CACTACGCTAATTGGG |
| AAS + | GACTCCGACACCTACATCTGCGAGGTGGAAGAT | AAGAACTCCCTGTACCTGCAGATGAACAGCCTG | TGCAGCAGAAGCCTGG |
| SAV + R | CAGAAAGAAGAGGTGCAGCTGGTCGTCGTCGGC | CGGACCGAGGATACCGCCGTGTACTATTGTGTG | ACAGGCTCCCAGAGGA |
| | GGCTCTGATAAGACCCATACCTGTCCTCCATGT | CGGCACGGCAACTTCGGCCACTCCTATGTGTCT | CTGATCGGCGGCACCT |
| | CCTGCTCCAGAAGCTGCTGGCGGCCCTTCCGTG | TGGTTTGCCTACTGGGGCCAGGGCACACTGGTC | CTAATAGAGCACCTGG |
| | TTTCTGTTCCCTCCAAAGCCTAAGGACACCCTG | ACAGTTTCTTCCGCCTCCACCAAGGGACCCAGC | CGTGCCAGCCAGATTC |
| | TACATCACCCGCGAGCCTGAAGTGACCTGCGTG | GTTTTCCCTCTGGCTCCATCCTCCAAGTCTACC | TCCGGATCTCTGCTTG |
| | GTGGTGGATGTGTCTCACGAGGACCCCGAAGTG | TCTGGCGGAACAGCTGCTCTGGGCTGCCTGGTC | GCGGAAAGGCCGCTCT |
| | AAGTTCAATTGGTACGTGGACGGCGTGGAAGTG | AAGGACTACTTTCCTGAGCCTGTGACCGTGTCC | GACAATCTCTGGTGCT |
| | CACAACGCCAAGACCAAGCCTAGAGAGGAACAG | TGGAACTCTGGCGCTCTGACATCTGGCGTGCAC | CAGCCTGAGGACGAGG |
| | TACAACTCCACCTACAGAGTGGTGTCCGTGCTG | ACCTTTCCAGCTGTGCTGCAGTCCTCCGGCCTG | CCGAGTACTATTGTGC |
| | ACCGTGCTGCACCAGGATTGGCTGAACGGCAAA | TACTCTCTGTCCTCTGTCGTGACCGTGCCTTCC | CCTGTGGTACTCCAAC |
| | GAGTACAAGTGCAAGGTGTCCAACAAGGCCCTG | AGCTCTCTGGGAACCCAGACCTACATCTGCAAT | AGATGGGTGTTCGGCG |
| | CCTGCCTCCATCGAAAAGACCATCTCCAAGGCC | GTGAACCACAAGCCTTCCAACACCAAGGTGGAC | GAGGCACCAAGCTGAC |
| | AAGGGCCAGCCTAGGGAACCCCAGGTTTACACC | AAGAAGGTGGAACCCAAGTCCTGCGACAAGACC | AGTTCTGGGACAGCCT |
| | CTGCCACCTAGCCGGGAAGAGATGACCAAGAAC | CACACCTGTCCTCCATGTCCTGCTCCAGAAGCT | AAGGCTGCCCCTTCCG |
| | CAGGTGTCACTGTGGTGCCTGGTCAAGGGCTTC | GCTGGCGGCCCTTCCGTGTTTCTGTTCCCTCCA | TGACTCTGTTCCCTCC |
| | TACCCCTCTGATATCGCCGTGGAATGGGAGAGC | AAGCCTAAGGACACCCTGATGATCTCTCGGACC | ATCCTCTGAGGAACTG |
| | AATGGCCAGCCTGAGAACAACTACAAGACCACA | CCTGAAGTGACCTGCGTGGTGGTGGATGTGTCT | CAGGCCAACAAGGCTA |
| | CCTCCTGTGCTGGACAGCGACGGCTCATTCTTC | CACGAGGATCCCGAAGTGAAGTTCAATTGGTAC | CCCTCGTGTGCCTGAT |
| | CTGTACAGCAAGCTGACAGTGGACAAGTCCAGA | GTGGACGGCGTGGAAGTGCACAACGCCAAGACC | CTCCGACTTTTACCCT |
| | TGGCAGCAGGGCAACGTGTTCTCCTGCTCCGTG | AAGCCTAGAGAGGAACAGTACAACTCCACCTAC | GGCGCCGTGACCGTGG |
| | ATGCACGAGGCCCTGCACAATCACTACACCCAG | AGAGTGGTGTCCGTGCTGACCGTGCTGCACCAG | CTTGGAAGGCTGATAG |
| | AAGTCCCTGTCTCTGTCCCCTGGCAAA | GATTGGCTGAACGGCAAAGAGTACAAGTGCAAG | TTCTCCTGTGAAGGCC |
| | | GTGTCCAACAAGGCCCTGCCTGCCTCCATCGAA | GGCGTGGAAACCACCA |
| | | AAGACCATCTCCAAGGCCAAGGGCCAGCCTAGG | CACCTAGCAAGCAGTC |
| | | GAACCCCAGGTTTACACCCTGCCACCTAGCCGG | CAACAACAAATACGCC |
| | | GAAGAGATGACCAAGAACCAGGTGTCCCTGTCC | GCCTCCTCCTACCTGT |
| | | TGTGCCGTGAAGGGCTTCTACCCTTCCGATATC | CTCTGACCCCTGAACA |
| | | GCCGTGGAATGGGAGAGCAATGGCCAGCCTGAG | GTGGAAGTCCCACCGG |
| | | AACAACTACAAGACAACCCCTCCTGTGCTGGAC | TCCTACAGCTGCCAAG |
| | | TCCGACGGCTCATTCTTCCTGGTGTCCAAGCTG | TGACCCATGAGGGCTC |
| | | ACAGTGGACAAGTCCAGGTGGCAGCAGGGCAAC | CACCGTGGAAAAGACA |
| | | GTGTTCTCCTGCTCTGTGATGCACGAGGCCCTG | GTGGCCCCTACCGAGT |
| | | CACAACCGGTACACCCAGAAGTCTCTGTCTCTG | GCTCT |
| | | AGCCCTGGCAAG | |
| 437 | SEQ ID NO: 998 | SEQ ID NO: 1009 | SEQ ID NO: 1000 |
| hCD4 | AAAAAGGTGGTGTACGGCAAGAAGGGCGACACC | GAGGTGCAGCTGGTGGAATCTGGCGGAGGATTG | CAGGCCGTGGTCACCC |
| D1.22 | GTCGAGCTGACCTGTACCGCCTCTCAGAAGAAG | GTTCAGCCTGGCGGCTCTCTGTCTCTGTCTTGT | AAGAGCCTAGCCTGAC |
| Fc | AACATCCAGTTCCACTGGAAGAACTCCAACCAG | GCCGCTTCTGGCTTCACCTTCAACACCTACGCT | AGTTTCTCCTGGCGGC |
| AAS + W + | ATCAAGATCCTGGGCAACCAGGGCAGCTTCCTG | ATGAACTGGGTCCGACAGGCCCCTGGCAAAGGA | ACCGTGACACTGACCT |
| YTE/ | ACCAAGGGACCTTCCAAGCTGAACGACAGAGTG | CTGGAATGGGTCGGACGGATCCGGTCCAAGTAC | GTGGATCTTCTACCGG |
| huSP3 | GACTCCAGACGGTCCCTGTGGGACCAGGGCAAC | AACAACTACGCCACCTACTACGCCGACTCCGTG | CGCTGTGACCACCGGC |
| 4.41.13 | TTTCCACTGATCATCAAGAACCTGAAGCCTGAG | AAGTCCCGGTTCACCATCTCTCGGGACGACTCC | CACTACGCTAATTGGG |
| AAS + | GACTCCGACACCTACATCTGCGAGGTGGAAGAT | AAGAACTCCCTGTACCTGCAGATGAACAGCCTG | TGCAGCAGAAGCCTGG |
| SAV + R | CAGAAAGAAGAGGTGCAGCTGGTCGTCGTCGGC | CGGACCGAGGATACCGCCGTGTACTATTGTGTG | ACAGGCTCCCAGAGGA |
| | GGCTCTGATAAGACCCATACCTGTCCTCCATGT | CGGCACGGCAACTTCGGCCACTCCTATGTGTCT | CTGATCGGCGGCACCT |
| | CCTGCTCCAGAAGCTGCTGGCGGCCCTTCCGTG | TGGTTTGCCTACTGGGGCCAGGGCACACTGGTC | CTAATAGAGCACCTGG |
| | TTTCTGTTCCCTCCAAAGCCTAAGGACACCCTG | ACAGTTTCTTCCGCCTCCACCAAGGGACCCAGC | CGTGCCAGCCAGATTC |
| | TACATCACCCGCGAGCCTGAAGTGACCTGCGTG | GTTTTCCCTCTGGCTCCATCCTCCAAGTCTACC | TCCGGATCTCTGCTTG |
| | GTGGTGGATGTGTCTCACGAGGACCCCGAAGTG | TCTGGCGGAACAGCTGCTCTGGGCTGCCTGGTC | GCGGAAAGGCCGCTCT |
| | AAGTTCAATTGGTACGTGGACGGCGTGGAAGTG | AAGGACTACTTTCCTGAGCCTGTGACCGTGTCC | GACAATCTCTGGTGCT |
| | CACAACGCCAAGACCAAGCCTAGAGAGGAACAG | TGGAACTCTGGCGCTCTGACATCTGGCGTGCAC | CAGCCTGAGGACGAGG |
| | TACAACTCCACCTACAGAGTGGTGTCCGTGCTG | ACCTTTCCAGCTGTGCTGCAGTCCTCCGGCCTG | CCGAGTACTATTGTGC |
| | ACCGTGCTGCACCAGGATTGGCTGAACGGCAAA | TACAGTCTGTCCTCTGTCGTGACCGTGCCTTCC | CCTGTGGTACTCCAAC |
| | GAGTACAAGTGCAAGGTGTCCAACAAGGCCCTG | AGCTCTCTGGGAACCCAGACCTACATCTGCAAT | AGATGGGTGTTCGGCG |
| | CCTGCCTCCATCGAAAAGACCATCTCCAAGGCC | GTGAACCACAAGCCTTCCAACACCAAGGTGGAC | GAGGCACCAAGCTGAC |
| | AAGGGCCAGCCTAGGGAACCCCAGGTTTACACC | AAGAAGGTGGAACCCAAGTCCTGCGACAAGACC | AGTTCTGGGACAGCCT |
| | CTGCCACCTAGCCGGGAAGAGATGACCAAGAAC | CACACCTGTCCTCCATGTCCTGCTCCAGAAGCT | AAGGCTGCCCCTTCCG |
| | CAGGTGTCACTGTGGTGCCTGGTCAAGGGCTTC | GCTGGCGGCCCTTCCGTGTTTCTGTTCCCTCCA | TGACTCTGTTCCCTCC |
| | TACCCCTCTGATATCGCCGTGGAATGGGAGAGC | AAGCCTAAGGACACCCTGATGATCTCTCGGACC | ATCCTCTGAGGAACTG |
| | AATGGCCAGCCTGAGAACAACTACAAGACCACA | CCTGAAGTGACCTGCGTGGTGGTGGATGTGTCT | CAGGCCAACAAGGCTA |
| | CCTCCTGTGCTGGACAGCGACGGCTCATTCTTC | CACGAGGATCCCGAAGTGAAGTTCAATTGGTAC | CCCTCGTGTGCCTGAT |
| | CTGTACAGCAAGCTGACAGTGGACAAGTCCAGA | GTGGACGGCGTGGAAGTGCACAACGCCAAGACC | CTCCGACTTTTACCCT |
| | TGGCAGCAGGGCAACGTGTTCTCCTGCTCCGTG | AAGCCTAGAGAGGAACAGTACAACTCCACCTAC | GGCGCCGTGACCGTGG |
| | ATGCACGAGGCCCTGCACAATCACTACACCCAG | AGAGTGGTGTCCGTGCTGACCGTGCTGCACCAG | CTTGGAAGGCTGATAG |
| | AAGTCCCTGTCTCTGTCCCCTGGCAAA | GATTGGCTGAACGGCAAAGAGTACAAGTGCAAG | TTCTCCTGTGAAGGCC |
| | | GTGTCCAACAAGGCCCTGCCTGCCTCCATCGAA | GGCGTGGAAACCACCA |
| | | AAGACCATCTCCAAGGCCAAGGGCCAGCCTAGG | CACCTAGCAAGCAGTC |
| | | GAACCCCAGGTTTACACCCTGCCACCTAGCCGG | CAACAACAAATACGCC |
| | | GAAGAGATGACCAAGAACCAGGTGTCCCTGTCC | GCCTCCTCCTACCTGT |
| | | TGCGCCGTGAAGGGCTTCTACCCTTCTGATATC | CTCTGACCCCTGAACA |
| | | GCCGTGGAATGGGAGAGCAACGGCCAGCCTGAG | GTGGAAGTCCCACCGG |
| | | AACAACTACAAGACAACCCCTCCTGTGCTGGAC | TCCTACAGCTGCCAAG |
| | | TCCGACGGCTCATTCTTCCTGGTGTCCAAGCTG | TGACCCATGAGGGCTC |
| | | ACAGTGGACAAGTCTAGATGGCAGCAGGGCAAC | CACCGTGGAAAAGACA |
| | | GTGTTCTCCTGCTCCGTGATGCACGAGGCCCTG | GTGGCCCCTACCGAGT |
| | | CACAACAGATACACCCAGAAGTCCCTGTCTCTG | GCTCT |
| | | AGCCCCGGAAAA | |
| 438 | SEQ ID NO: 1010 | SEQ ID NO: 1011 | SEQ ID NO: 1012 |
| h3BNC | GAGGTGCAGCTGGTGGAATCTGGCGGAGGATTG | CAGGTGCAGCTGCTGCAGTCTGGCGCCGCTGTG | GATATTCAGATGACAC |
| 117.52.64 | GTTCAGCCTGGCGGCTCTCTGAGACTGTCTTGT | ACAAAACCAGGCGCTTCTGTGCGGGTGTCCTGC | AGAGCCCCAGTAGCCT |
| AAS + | GCCGCTTCTGGCTTCACCTTCAACACCTACGCC | GAGGCCAGCGGCTACAACATCCGGGACTACTTC | GAGCGCCAGCGTGGGC |
| SAV + | ATGAACTGGGTCCGACAGGCTCCTGGCAAAGGC | ATTCACTGGTGGCGCCAGGCCCCTGGACAGGGA | GACACCGCAACCATCA |
| YTE/hu | CTGGAATGGGTCGGACGGATCCGGTCCAAGTAC | CTGCAGTGGGTGGGATGGATCAACCCCAAGACC | CCTGTCAGGCCAACGG |
| SP34.3.13 | AACAATTACGCCACCTACTACGCCGACTCCGTG | GGCCAGCCCAACAACCCCAGACAGTTCCAGGGC | CTATCTGAACTGGTAT |
| scFv | AAGGGCAGATTCACCATCTCTCGGGACGACTCC | AGAGTGTCCCTGACCAGACACGCCAGCTTCGAC | CAACAGAGGAGGGGCA |
| AAS + W + | AAGAACTCCCTGTACCTGCAGATGAACAGCCTG | TTCGACACCTTCAGCTTCTACATGGACCTGAAG | AGGCCCCCAAGCTCCT |
| YTE | CGGACCGAGGATACCGCCGTGTACTATTGTGTG | GCCCTGCGGAGCGACGATACCGCCGTGTACTTC | GATATACGACGGCAGC |
| | CGGCACGGCAACTTCGGCCACTCCTATGTGTCT | TGCGCCAGACAGAGAAGCGACTACTGGGATTTC | AAGCTGGAGAGGGGCG |
| | TGGTTTGCCTACTGGGGCCAGGGCACACTGGTC | GACGTGTGGGGCAGCGGCACCCAAGTGACCGTG | TTCCCAGCCGCTTCAG |
| | ACAGTTTCTTCCGGCGGAGGTGGAAGCGGAGGC | TCATCTGCCTCTACAAAGGGCCCTAGTGTGTTC | CGGCAGGAGGTGGGGC |
| | GGAGGTAGTGGCGGTGGTGGTTCAGGTGGTGGT | CCTCTGGCTCCCAGCAGCAAGTCTACATCTGGC | CAGGAGTACAACCTTA |
| | GGATCTCAGGCTGTGGTTACCCAGGAGCCTAGC | GGAACAGCCGCTCTGGGCTGCCTGGTCAAGGAT | CAATCAACAACCTGCA |
| | CTGACAGTTTCTCCTGGCGGCACCGTGACACTG | TACTTTCCCGAGCCTGTGACCGTGTCCTGGAAT | GCCCGAGGACATCGCC |
| | ACCTGTGGATCTTCTACCGGCGCTGTGACCACC | TCTGGCGCTCTGACAAGCGGCGTGCACACCTTT | ACCTATTTCTGCCAAG |
| | GGCCATTACGCTAATTGGGTGCAGCAGAAGCCT | CCAGCTGTGCTGCAAAGCAGCGGCCTGTACTCT | TTTACGAGTTCGTGGT |
| | GGACAGGCCCCAAGAGGACTGATCGGCGGCACA | CTGAGCAGCGTGGTCACAGTGCCTAGCTCTAGC | GCCCGGCACCAGGCTG |
| | TCTAACAGAGCCCCTGGCGTCCCAGCCAGATTC | CTGGGCACCCAGACCTACATCTGCAATGTGAAC | GACCTGAAGCGGACCG |
| | TCTGGATCTCTGCTTGGCGGCAAGGCCGCTCTG | CACAAGCCTAGCAACACCAAGGTGGACAAGAAG | TGGCCGCCCCCAGCGT |
| | ACAATTTCTGGTGCTCAGCCTGAGGACGAGGCC | GTGGAACCCAAGAGCTGCGACAAGACCCACACC | GTTCATCTTCCCTCCC |
| | GAGTACTACTGTGCCCTGTGGTACTCCAACAGA | TGTCCTCCATGTCCTGCTCCAGAAGCTGCTGGC | AGCGACGAGCAGCTGA |
| | TGGGTGTTCGGCGGAGGCACCAAGCTGACAGTG | GGCCCTTCCGTGTTTCTGTTCCCTCCAAAGCCT | AGTCTGGCACCGCCAG |
| | TTGGAGCCCAAATCTTCAGACAAGACCCACACC | AAGGACACCCTGTACATCACCCGCGAGCCTGAA | CGTGGTGTGCCTGCTG |
| | TGTCCTCCATGTCCTGCTCCAGAAGCTGCTGGC | GTGACCTGCGTGGTGGTGGATGTGTCCCACGAG | AACAACTTCTACCCCC |
| | GGCCCTTCTGTGTTCCTGTTTCCTCCAAAGCCT | GATCCCGAAGTGAAGTTCAATTGGTACGTGGAC | GCGAGGCCAAGGTGCA |
| | AAGGACACCCTGTACATCACCCGCGAGCCTGAA | GGCGTGGAAGTGCACAACGCCAAGACCAAGCCT | GTGGAAGGTGGACAAC |
| | GTGACCTGTGTGGTGGTGGATGTGTCCCACGAG | AGAGAGGAACAGTACAACAGCACCTACAGAGTG | GCCCTGCAGAGCGGCA |
| | GACCCCGAAGTGAAGTTCAATTGGTACGTGGAC | GTGTCCGTGCTGACCGTGCTGCACCAGGATTGG | ACAGCCAGGAGAGCGT |
| | GGCGTGGAAGTGCACAACGCCAAGACCAAGCCT | CTGAACGGCAAAGAGTACAAGTGCAAGGTGTCC | GACCGAGCAGGACTCC |
| | AGAGAGGAACAGTACAACAGCACCTACAGAGTG | AACAAGGCCCTGCCTGCCAGCATCGAGAAAACC | AAGGACAGCACCTACA |
| | GTGTCCGTGCTGACCGTGCTGCACCAGGATTGG | ATCAGCAAGGCCAAGGGCCAGCCTAGGGAACCC | GCCTGAGCAGCACCCT |
| | CTGAACGGCAAAGAGTACAAGTGCAAGGTGTCC | CAGGTTTACACACTGCCTCCAAGCCGGGAAGAG | GACCCTGAGCAAGGCC |
| | AACAAGGCCCTGCCTGCCAGCATCGAGAAAACC | ATGACCAAGAACCAGGTGTCCCTGAGCTGTGCC | GACTACGAGAAGCACA |
| | ATCAGCAAGGCCAAGGGCCAGCCTAGGGAACCC | GTGAAGGGCTTCTACCCTTCCGATATCGCCGTG | AGGTGTACGCCTGCGA |
| | CAGGTTTACACACTGCCTCCAAGCCGGGAAGAG | GAATGGGAGAGCAATGGCCAGCCTGAGAACAAC | GGTGACCCACCAGGGA |
| | ATGACCAAGAACCAGGTGTCCCTGTGGTGCCTC | TACAAGACAACCCCTCCTGTGCTGGACAGCGAC | CTGTCTAGCCCCGTGA |
| | GTGAAGGGCTTCTACCCTTCCGATATCGCCGTG | GGCTCATTCTTCCTGGTGTCCAAGCTGACAGTG | CCAAGAGCTTCAACCG |
| | GAATGGGAGAGCAATGGCCAGCCTGAGAACAAC | GACAAGTCCAGATGGCAGCAGGGCAACGTGTTC | GGGCGAGTGC |
| | TACAAGACAACCCCTCCTGTGCTGGACAGCGAC | AGCTGCAGCGTGATGCACGAGGCCCTGCACAAC | |
| | GGCTCATTCTTCCTGTACAGCAAGCTGACAGTG | CACTACACCCAGAAGTCCCTGTCTCTGAGCCCC | |
| | GACAAGTCCAGATGGCAGCAGGGCAACGTGTTC | GGCAAA | |
| | AGCTGCAGCGTGATGCACGAGGCCCTGCACAAC | | |
| | CACTACACCCAGAAGTCCCTGAGCCTGTCTCCT | | |
| | GGCAAA | | |
| 439 | SEQ ID NO: 1013 | SEQ ID NO: 1014 | SEQ ID NO: 1015 |
| h3BNC | GAGGTGCAGCTGGTGGAATCTGGCGGAGGATTG | CAGGTGCAGCTGTTGCAATCTGGCGCCGCTGTG | GACATCCAGATGACCC |
| 117.52.64 | GTTCAGCCTGGCGGCTCTCTGAGACTGTCTTGT | ACAAAGCCTGGTGCCTCTGTTAGAGTGTCCTGC | AGTCTCCATCCTCTCT |
| AAS + | GCCGCTTCTGGCTTCACCTTCAACACCTACGCT | GAGGCCTCCGGCTACAACATCCGGGACTACTTC | GTCCGCCTCTGTGGGC |
| SAV + | ATGAACTGGGTCCGACAGGCCCCTGGCAAAGGA | ATCCACTGGTGGCGGCAGGCTCCAGGACAGGGA | GATACCGCTACCATTA |
| YTE/huS | CTGGAATGGGTCGGACGGATCCGGTCCAAGTAC | TTGCAATGGGTCGGATGGATCAACCCCAAGACC | CCTGTCAGGCCAACGG |
| P34.3.13 | AACAACTACGCCACCTACTACGCCGACTCCGTG | GGCCAGCCTAACAACCCTAGACAGTTCCAGGGC | CTACCTGAACTGGTAT |
| scFv | AAGGGCAGATTCACCATCTCTCGGGACGACTCC | AGAGTGTCTCTGACCCGGCACGCCTCTTTCGAC | CAGCAGCGGAGAGGCA |
| AAS + W + | AAGAACTCCCTGTACCTGCAGATGAACAGCCTG | TTCGACACCTTCAGCTTCTACATGGACCTGAAG | AGGCCCCTAAGCTGCT |
| YTE | CGGACCGAGGATACCGCCGTGTACTATTGTGTG | GCCCTGCGGAGCGACGATACCGCCGTGTACTTT | GATCTACGACGGCTCC |
| | CGGCACGGCAACTTCGGCCACTCCTATGTGTCT | TGCGCCAGACAGAGATCCGACTACTGGGACTTC | AAGCTGGAAAGAGGCG |
| | TGGTTTGCCTACTGGGGCCAGGGCACACTGGTC | GACGTGTGGGGCTCTGGCACCCAAGTGACAGTG | TGCCCTCCAGATTCTC |
| | ACAGTTTCTAGCGGCGGAGGTGGAAGCGGAGGC | TCCTCCGCTTCCACCAAGGGACCCTCTGTGTTT | CGGCAGAAGATGGGGC |
| | GGAGGTAGTGGTGGTGGCGGATCTGGTGGCGGT | CCTCTGGCTCCCTCCAGCAAGTCTACCTCTGGT | CAAGAGTACAACCTGA |
| | GGATCTCAGGCTGTGGTCACCCAAGAGCCTAGC | GGAACAGCTGCTCTGGGCTGCCTGGTCAAGGAT | CCATCAACAACCTGCA |
| | CTGACAGTTTCTCCTGGCGGCACCGTGACACTG | TACTTCCCTGAGCCTGTGACCGTGTCCTGGAAT | GCCTGAGGATATCGCC |
| | ACCTGTGGATCTTCTACCGGCGCTGTGACCACC | TCTGGCGCTCTGACATCCGGCGTGCACACCTTT | ACATACTTTTGCCAGG |
| | GGCCACTACGCTAATTGGGTGCAGCAGAAGCCT | CCAGCTGTGCTGCAATCCTCCGGCCTGTACTCT | TGTACGAGTTCGTGGT |
| | GGACAGGCTCCCAGAGGACTGATCGGCGGCACC | CTGTCCTCCGTCGTGACCGTGCCTTCTAGCTCT | GCCCGGCACAAGACTG |
| | TCTAATAGAGCACCTGGCGTGCCAGCCAGATTC | CTGGGCACCCAGACCTACATCTGCAATGTGAAC | GACCTGAAGAGAACAG |
| | TCTGGATCTCTGCTCGGCGGAAAGGCCGCTCTG | CACAAGCCTTCCAACACCAAGGTGGACAAGAAG | TGGCCGCTCCTTCCGT |
| | ACAATTTCTGGTGCCCAGCCTGAGGACGAGGCC | GTGGAACCCAAGTCCTGCGACAAGACCCACACC | GTTCATCTTCCCACCT |
| | GAGTATTATTGTGCCCTGTGGTACTCCAACCGC | TGTCCTCCATGTCCTGCTCCAGAAGCTGCTGGC | TCCGACGAGCAGCTGA |
| | TGGGTTTTCGGCGGAGGCACCAAGCTGACAGTG | GGCCCATCCGTGTTTCTGTTCCCTCCAAAGCCT | AGTCTGGCACAGCCTC |
| | CTGGAACCTAAGTCCTCCGACAAGACCCACACC | AAGGACACCCTGTACATCACCCGCGAGCCTGAA | TGTCGTGTGCCTGCTG |
| | TGTCCTCCATGTCCTGCTCCAGAAGCTGCTGGC | GTGACCTGCGTGGTGGTGGATGTGTCTCACGAG | AACAACTTCTACCCTC |
| | GGCCCTTCCGTGTTTCTGTTCCCTCCAAAGCCT | GACCCCGAAGTGAAGTTCAATTGGTACGTGGAC | GGGAAGCCAAGGTGCA |
| | AAGGACACCCTGTACATCACCCGCGAGCCTGAA | GGCGTGGAAGTGCACAACGCCAAGACCAAGCCT | GTGGAAGGTGGACAAT |
| | GTGACCTGCGTGGTGGTCGATGTGTCTCACGAG | AGAGAGGAACAGTACAACTCCACCTACAGAGTG | GCCCTGCAGTCCGGCA |
| | GACCCCGAAGTGAAGTTCAATTGGTACGTGGAC | GTGTCCGTGCTGACCGTGCTGCACCAGGATTGG | ACTCCCAAGAGTCTGT |
| | GGCGTGGAAGTGCACAACGCCAAGACCAAGCCT | CTGAACGGCAAAGAGTACAAGTGCAAGGTGTCC | GACCGAGCAGGACTCC |
| | AGAGAGGAACAGTACAACTCCACCTACAGAGTG | AACAAGGCTCTGCCCGCCTCCATCGAAAAGACC | AAGGACAGCACCTACA |
| | GTGTCCGTGCTGACCGTGCTGCACCAGGATTGG | ATCTCCAAGGCTAAGGGCCAGCCTCGGGAACCC | GCCTGTCCTCCACACT |
| | CTGAACGGCAAAGAGTACAAGTGCAAGGTGTCC | CAGGTTTACACATTGCCTCCAAGCCGGGAAGAG | GACCCTGTCCAAGGCC |
| | AACAAGGCCCTGCCTGCCTCCATCGAAAAGACC | ATGACCAAGAACCAGGTGTCCCTGAGCTGCGCC | GACTACGAGAAGCACA |
| | ATCTCCAAGGCCAAGGGCCAGCCTAGGGAACCC | GTGAAGGGCTTCTACCCTTCTGATATCGCCGTG | AGGTGTACGCCTGCGA |
| | CAGGTTTACACCCTGCCACCTAGCCGGGAAGAG | GAATGGGAGTCCAACGGCCAGCCAGAGAACAAC | AGTGACCCATCAGGGC |
| | ATGACCAAGAACCAGGTGTCCCTGTGGTGCCTG | TACAAGACAACCCCTCCTGTGCTGGACTCCGAC | CTGTCTAGCCCTGTGA |
| | GTCAAGGGCTTCTACCCTTCCGATATCGCCGTG | GGCTCATTCTTCCTGGTGTCTAAGCTGACAGTG | CCAAGTCTTTCAACCG |
| | GAATGGGAGAGCAACGGACAGCCCGAGAACAAC | GACAAGTCCAGATGGCAGCAGGGCAACGTGTTC | GGGCGAGTGT |
| | TACAAGACAACCCCTCCTGTGCTGGACTCCGAC | TCCTGCTCCGTGATGCACGAGGCCCTGCACAAT | |
| | GGCTCATTCTTCCTGTACAGCAAGCTGACTGTG | CACTACACCCAGAAGTCCCTGTCTCTGTCCCCT | |
| | GACAAGTCCAGATGGCAGCAGGGCAACGTGTTC | GGCAAA | |
| | TCCTGCTCCGTGATGCACGAGGCCCTGCACAAT | | |
| | CACTACACCCAGAAGTCCCTGTCTCTGAGCCCT | | |
| | GGCAAG | | |
| 440 | SEQ ID NO: 1016 | SEQ ID NO: 1017 | SEQ ID NO: 1012 |
| h3BNC | GAGGTGCAGCTGGTGGAATCTGGCGGAGGATTG | CAGGTGCAGCTGCTGCAGTCTGGCGCCGCTGTG | GATATTCAGATGACAC |
| 117.52.64 | GTTCAGCCTGGCGGCTCTCTGAGACTGTCTTGT | ACAAAACCAGGCGCTTCTGTGCGGGTGTCCTGC | AGAGCCCCAGTAGCCT |
| AAS + | GCCGCTTCTGGCTTCACCTTCAACACCTACGCC | GAGGCCAGCGGCTACAACATCCGGGACTACTTC | GAGCGCCAGCGTGGGC |
| SAV/hu | ATGAACTGGGTCCGACAGGCTCCTGGCAAAGGC | ATTCACTGGTGGCGCCAGGCCCCTGGACAGGGA | GACACCGCAACCATCA |
| SP34.3.13 | CTGGAATGGGTCGGACGGATCCGGTCCAAGTAC | CTGCAGTGGGTGGGATGGATCAACCCCAAGACC | CCTGTCAGGCCAACGG |
| scFv | AACAATTACGCCACCTACTACGCCGACTCCGTG | GGCCAGCCCAACAACCCCAGACAGTTCCAGGGC | CTATCTGAACTGGTAT |
| AAS + W | AAGGGCAGATTCACCATCTCTCGGGACGACTCC | AGAGTGTCCCTGACCAGACACGCCAGCTTCGAC | CAACAGAGGAGGGGCA |
| | AAGAACTCCCTGTACCTGCAGATGAACAGCCTG | TTCGACACCTTCAGCTTCTACATGGACCTGAAG | AGGCCCCCAAGCTCCT |
| | CGGACCGAGGATACCGCCGTGTACTATTGTGTG | GCCCTGCGGAGCGACGATACCGCCGTGTACTTC | GATATACGACGGCAGC |
| | CGGCACGGCAACTTCGGCCACTCCTATGTGTCT | TGCGCCAGACAGAGAAGCGACTACTGGGATTTC | AAGCTGGAGAGGGGCG |
| | TGGTTTGCCTACTGGGGCCAGGGCACACTGGTC | GACGTGTGGGGCAGCGGCACCCAAGTGACCGTG | TTCCCAGCCGCTTCAG |
| | ACAGTTTCTTCCGGCGGAGGTGGAAGCGGAGGC | TCATCTGCCTCTACAAAGGGCCCTAGTGTGTTC | CGGCAGGAGGTGGGGC |
| | GGAGGTAGTGGCGGTGGTGGTTCAGGTGGTGGT | CCTCTGGCTCCCAGCAGCAAGTCTACATCTGGC | CAGGAGTACAACCTTA |
| | GGATCTCAGGCTGTGGTTACCCAGGAGCCTAGC | GGAACAGCCGCTCTGGGCTGCCTGGTCAAGGAT | CAATCAACAACCTGCA |
| | CTGACAGTTTCTCCTGGCGGCACCGTGACACTG | TACTTTCCCGAGCCTGTGACCGTGTCCTGGAAT | GCCCGAGGACATCGCC |
| | ACCTGTGGATCTTCTACCGGCGCTGTGACCACC | TCTGGCGCTCTGACAAGCGGCGTGCACACCTTT | ACCTATTTCTGCCAAG |
| | GGCCATTACGCTAATTGGGTGCAGCAGAAGCCT | CCAGCTGTGCTGCAAAGCAGCGGCCTGTACTCT | TTTACGAGTTCGTGGT |
| | GGACAGGCCCCAAGAGGACTGATCGGCGGCACA | CTGAGCAGCGTGGTCACAGTGCCTAGCTCTAGC | GCCCGGCACCAGGCTG |
| | TCTAACAGAGCCCCTGGCGTCCCAGCCAGATTC | CTGGGCACCCAGACCTACATCTGCAATGTGAAC | GACCTGAAGCGGACCG |
| | TCTGGATCTCTGCTTGGCGGCAAGGCCGCTCTG | CACAAGCCTAGCAACACCAAGGTGGACAAGAAG | TGGCCGCCCCCAGCGT |
| | ACAATTTCTGGTGCTCAGCCTGAGGACGAGGCC | GTGGAACCCAAGAGCTGCGACAAGACCCACACC | GTTCATCTTCCCTCCC |
| | GAGTACTACTGTGCCCTGTGGTACTCCAACAGA | TGTCCTCCATGTCCTGCTCCAGAAGCTGCTGGC | AGCGACGAGCAGCTGA |
| | TGGGTGTTCGGCGGAGGCACCAAGCTGACAGTG | GGCCCTTCCGTGTTTCTGTTCCCTCCAAAGCCT | AGTCTGGCACCGCCAG |
| | TTGGAGCCCAAATCTTCAGACAAGACCCACACC | AAGGACACCCTGATGATCAGCAGAACCCCTGAA | CGTGGTGTGCCTGCTG |
| | TGTCCTCCATGTCCTGCTCCAGAAGCTGCTGGC | GTGACCTGCGTGGTGGTGGATGTGTCCCACGAG | AACAACTTCTACCCCC |
| | GGCCCTTCCGTGTTTCTGTTCCCTCCAAAGCCT | GATCCCGAAGTGAAGTTCAATTGGTACGTGGAC | GCGAGGCCAAGGTGCA |
| | AAGGACACCCTGATGATCAGCAGAACCCCTGAA | GGCGTGGAAGTGCACAACGCCAAGACCAAGCCT | GTGGAAGGTGGACAAC |
| | GTGACCTGCGTGGTGGTGGATGTGTCCCACGAG | AGAGAGGAACAGTACAACAGCACCTACAGAGTG | GCCCTGCAGAGCGGCA |
| | GATCCCGAAGTGAAGTTCAATTGGTACGTGGAC | GTGTCCGTGCTGACCGTGCTGCACCAGGATTGG | ACAGCCAGGAGAGCGT |
| | GGCGTGGAAGTGCACAACGCCAAGACCAAGCCT | CTGAACGGCAAAGAGTACAAGTGCAAGGTGTCC | GACCGAGCAGGACTCC |
| | AGAGAGGAACAGTACAACAGCACCTACAGAGTG | AACAAGGCCCTGCCTGCCAGCATCGAGAAAACC | AAGGACAGCACCTACA |
| | GTGTCCGTGCTGACCGTGCTGCACCAGGATTGG | ATCAGCAAGGCCAAGGGCCAGCCTAGGGAACCC | GCCTGAGCAGCACCCT |
| | CTGAACGGCAAAGAGTACAAGTGCAAGGTGTCC | CAGGTTTACACACTGCCTCCAAGCCGGGAAGAG | GACCCTGAGCAAGGCC |
| | AACAAGGCCCTGCCTGCCAGCATCGAGAAAACC | ATGACCAAGAACCAGGTGTCCCTGAGCTGTGCC | GACTACGAGAAGCACA |
| | ATCAGCAAGGCCAAGGGCCAGCCTAGGGAACCC | GTGAAGGGCTTCTACCCTTCCGATATCGCCGTG | AGGTGTACGCCTGCGA |
| | CAGGTTTACACCCTGCCTCCAAGCCGGGAAGAG | GAATGGGAGAGCAATGGCCAGCCTGAGAACAAC | GGTGACCCACCAGGGA |
| | ATGACCAAGAACCAGGTGTCCCTGTGGTGCCTG | TACAAGACAACCCCTCCTGTGCTGGACAGCGAC | CTGTCTAGCCCCGTGA |
| | GTCAAGGGCTTCTACCCTTCCGATATCGCCGTG | GGCTCATTCTTCCTGGTGTCCAAGCTGACAGTG | CCAAGAGCTTCAACCG |
| | GAATGGGAGAGCAATGGCCAGCCTGAGAACAAC | GACAAGTCCAGATGGCAGCAGGGCAACGTGTTC | GGGCGAGTGC |
| | TACAAGACAACCCCTCCTGTGCTGGACAGCGAC | AGCTGCAGCGTGATGCACGAGGCCCTGCACAAC | |
| | GGCTCATTCTTCCTGTACAGCAAGCTGACAGTG | CACTACACCCAGAAGTCCCTGTCTCTGAGCCCC | |
| | GACAAGAGCAGATGGCAGCAGGGCAACGTGTTC | GGCAAA | |
| | AGCTGCAGCGTGATGCACGAGGCCCTGCACAAC | | |
| | CACTACACCCAGAAGTCCCTGAGCCTGTCTCCT | | |
| | GGCAAA | | |
| 441 | SEQ ID NO: 1018 | SEQ ID NO: 1019 | SEQ ID NO: 1012 |
| h3BNC | GAGGTGCAGCTGGTGGAATCTGGCGGAGGATTG | CAGGTGCAGCTGCTGCAGTCTGGCGCCGCTGTG | GATATTCAGATGACAC |
| 117.52.64 | GTTCAGCCTGGCGGCTCTCTGAGACTGTCTTGT | ACAAAACCAGGCGCTTCTGTGCGGGTGTCCTGC | AGAGCCCCAGTAGCCT |
| AAS + | GCCGCTTCTGGCTTCACCTTCAACACCTACGCC | GAGGCCAGCGGCTACAACATCCGGGACTACTTC | GAGCGCCAGCGTGGGC |
| W + YTE/ | ATGAACTGGGTCCGACAGGCTCCTGGCAAAGGC | ATTCACTGGTGGCGCCAGGCCCCTGGACAGGGA | GACACCGCAACCATCA |
| huSP34. | CTGGAATGGGTCGGACGGATCCGGTCCAAGTAC | CTGCAGTGGGTGGGATGGATCAACCCCAAGACC | CCTGTCAGGCCAACGG |
| 39.13 | AACAATTACGCCACCTACTACGCCGACTCCGTG | GGCCAGCCCAACAACCCCAGACAGTTCCAGGGC | CTATCTGAACTGGTAT |
| scFv | AAGAGCAGATTCACCATCTCTCGGGACGACTCC | AGAGTGTCCCTGACCAGACACGCCAGCTTCGAC | CAACAGAGGAGGGGCA |
| AAS + | AAGAACTCCCTGTACCTGGAGATGAACAGCCTG | TTCGACACCTTCAGCTTCTACATGGACCTGAAG | AGGCCCCCAAGCTCCT |
| SAV + R | CGGACCGAGGATACCGCCGTGTACTATTGTGTG | GCCCTGCGGAGCGACGATACCGCCGTGTACTTC | GATATACGACGGCAGC |
| | CGGCACGGCAACTTCGGCCACTCCTATGTGTCT | TGCGCCAGACAGAGAAGCGACTACTGGGATTTC | AAGCTGGAGAGGGGCG |
| | TGGTTTGCCTACTGGGGCCAGGGCACACTGGTC | GACGTGTGGGGCAGCGGCACCCAAGTGACCGTG | TTCCCAGCCGCTTCAG |
| | ACAGTTTCTTCCGGCGGAGGTGGAAGCGGAGGC | TCATCTGCTAGCACCAAGGGCCCCTCCGTGTTT | CGGCAGGAGGTGGGGC |
| | GGAGGTAGTGGCGGTGGTGGTTCAGGTGGTGGT | CCACTGGCTCCTAGCAGCAAGAGCACAAGCGGA | CAGGAGTACAACCTTA |
| | GGATCTCAGGCTGTGGTTACCCAGGAGCCTAGC | GGAACAGCCGCTCTGGGCTGTCTGGTCAAGGAC | CAATCAACAACCTGCA |
| | CTGACAGTTTCTCCTGGCGGCACCGTGACACTG | TACTTTCCCGAGCCTGTGACCGTGTCCTGGAAT | GCCCGAGGACATCGCC |
| | ACCTGTGGATCTTCTACCGGCGCTGTGACCACC | TCTGGCGCTCTGACAAGCGGCGTGCACACCTTT | ACCTATTTCTGCCAAG |
| | GGCCATTACGCTAATTGGGTGCAGCAGAAGCCT | CCAGCTGTGCTGCAAAGCAGCGGCCTGTACTCT | TTTACGAGTTCGTGGT |
| | GGACAGGCCCCAAGAGGACTGATCGGCGGCACA | CTGAGCAGCGTGGTCACAGTGCCAAGCTCTAGC | GCCCGGCACCAGGCTG |
| | TCTAACAGAGCCCCTGGCGTCCCAGCCAGATTC | CTGGGCACCCAGACCTACATCTGCAATGTGAAC | GACCTGAAGCGGACCG |
| | TCTGGATCTCTGCTTGGCGGCAAGGCCGCTCTG | CACAAGCCTAGCAACACCAAGGTGGACAAGAAG | TGGCCGCCCCCAGCGT |
| | ACAATTTCTGGTGCTCAGCCTGAGGACGAGGCC | GTGGAACCCAAGAGCTGCGACAAGACCCACACC | GTTCATCTTCCCTCCC |
| | GAGTACTACTGTGCCCTGTGGTACTCCAACAGA | TGTCCTCCATGTCCTGCTCCAGAAGCTGCTGGC | AGCGACGAGCAGCTGA |
| | TGGGTGTTCGGCGGAGGCACCAAGCTGACAGTG | GGCCCTTCTGTGTTCCTGTTTCCTCCAAAGCCT | AGTCTGGCACCGCCAG |
| | TTGGAGCCCAAATCTTCAGACAAGACCCACACC | AAGGACACCCTGTACATCACCCGCGAGCCTGAA | CGTGGTGTGCCTGCTG |
| | TGTCCTCCATGTCCTGCTCCAGAAGCTGCTGGC | GTGACCTGTGTGGTGGTGGATGTGTCCCACGAG | AACAACTTCTACCCCC |
| | GGCCCTTCCGTGTTTCTGTTCCCTCCAAAGCCT | GACCCCGAAGTGAAGTTCAATTGGTACGTGGAC | GCGAGGCCAAGGTGCA |
| | AAGGACACCCTGATGATCAGCAGAACCCCTGAA | GGCGTGGAAGTGCACAACGCCAAGACCAAGCCT | GTGGAAGGTGGACAAC |
| | GTGACCTGCGTGGTGGTGGATGTGTCCCACGAG | AGAGAGGAACAGTACAACAGCACCTACAGAGTG | GCCCTGCAGAGCGGCA |
| | GATCCCGAAGTGAAGTTCAATTGGTACGTGGAC | GTGTCCGTGCTGACCGTGCTGCACCAGGATTGG | ACAGCCAGGAGAGCGT |
| | GGCGTGGAAGTGCACAACGCCAAGACCAAGCCT | CTGAACGGCAAAGAGTACAAGTGCAAGGTGTCC | GACCGAGCAGGACTCC |
| | AGAGAGGAACAGTACAACAGCACCTACAGAGTG | AACAAGGCCCTGCCTGCCAGCATCGAGAAAACC | AAGGACAGCACCTACA |
| | GTGTCCGTGCTGACCGTGCTGCACCAGGATTGG | ATCAGCAAGGCCAAGGGCCAGCCTAGGGAACCC | GCCTGAGCAGCACCCT |
| | CTGAACGGCAAAGAGTACAAGTGCAAGGTGTCC | CAGGTTTACACACTGCCTCCAAGCCGGGAAGAG | GACCCTGAGCAAGGCC |
| | AACAAGGCCCTGCCTGCCAGCATCGAGAAAACC | ATGACCAAGAACCAGGTGTCCCTGTGGTGCCTC | GACTACGAGAAGCACA |
| | ATCAGCAAGGCCAAGGGCCAGCCTAGGGAACCC | GTGAAGGGCTTCTACCCTTCCGATATCGCCGTG | AGGTGTACGCCTGCGA |
| | CAGGTTTACACACTGCCTCCAAGCCGGGAAGAG | GAATGGGAGAGCAATGGCCAGCCTGAGAACAAC | GGTGACCCACCAGGGA |
| | ATGACCAAGAACCAGGTGTCCCTGAGCTGTGCC | TACAAGACAACCCCTCCTGTGCTGGACAGCGAC | CTGTCTAGCCCCGTGA |
| | GTGAAGGGCTTCTACCCTTCCGATATCGCCGTG | GGCTCATTCTTCCTGTACAGCAAGCTGACAGTG | CCAAGAGCTTCAACCG |
| | GAATGGGAGAGCAATGGCCAGCCTGAGAACAAC | GACAAGTCCAGATGGCAGCAGGGCAACGTGTTC | GGGCGAGTGC |
| | TACAAGACAACCCCTCCTGTGCTGGACAGCGAC | AGCTGCAGCGTGATGCACGAGGCCCTGCACAAC | |
| | GGCTCATTCTTCCTGGTGTCCAAGCTGACAGTG | CACTACACCCAGAAGTCCCTGAGCCTGTCTCCT | |
| | GACAAGTCCAGATGGCAGCAGGGCAACGTGTTC | GGCAAA | |
| | AGCTGCAGCGTGATGCACGAGGCCCTGCACAAC | | |
| | CGGTACACCCAGAAGTCCCTGTCTCTGAGCCCC | | |
| | GGCAAA | | |
| 442 | SEQ ID NO: 1018 | SEQ ID NO: 1020 | SEQ ID NO: 1012 |
| h3BNC | GAGGTGCAGCTGGTGGAATCTGGCGGAGGATTG | CAGGTGCAGCTGCTGCAGTCTGGCGCCGCTGTG | GATATTCAGATGACAC |
| 117.52.64 | GTTCAGCCTGGCGGCTCTCTGAGACTGTCTTGT | ACAAAACCAGGCGCTTCTGTGCGGGTGTCCTGC | AGAGCCCCAGTAGCCT |
| AAS + | GCCGCTTCTGGCTTCACCTTCAACACCTACGCC | GAGGCCAGCGGCTACAACATCCGGGACTACTTC | GAGCGCCAGCGTGGGC |
| W/huSP34. | ATGAACTGGGTCCGACAGGCTCCTGGCAAAGGC | ATTCACTGGTGGCGCCAGGCCCCTGGACAGGGA | GACACCGCAACCATCA |
| 39.13 | CTGGAATGGGTCGGACGGATCCGGTCCAAGTAC | CTGCAGTGGGTGGGATGGATCAACCCCAAGACC | CCTGTCAGGCCAACGG |
| scFv | AACAATTACGCCACCTACTACGCCGACTCCGTG | GGCCAGCCCAACAACCCCAGACAGTTCCAGGGC | CTATCTGAACTGGTAT |
| AAS + | AAGAGCAGATTCACCATCTCTCGGGACGACTCC | AGAGTGTCCCTGACCAGACACGCCAGCTTCGAC | CAACAGAGGAGGGGCA |
| SAV + R | AAGAACTCCCTGTACCTGGAGATGAACAGCCTG | TTCGACACCTTCAGCTTCTACATGGACCTGAAG | AGGCCCCCAAGCTCCT |
| | CGGACCGAGGATACCGCCGTGTACTATTGTGTG | GCCCTGCGGAGCGACGATACCGCCGTGTACTTC | GATATACGACGGCAGC |
| | CGGCACGGCAACTTCGGCCACTCCTATGTGTCT | TGCGCCAGACAGAGAAGCGACTACTGGGATTTC | AAGCTGGAGAGGGGCG |
| | TGGTTTGCCTACTGGGGCCAGGGCACACTGGTC | GACGTGTGGGGCAGCGGCACCCAAGTGACCGTG | TTCCCAGCCGCTTCAG |
| | ACAGTTTCTTCCGGCGGAGGTGGAAGCGGAGGC | TCATCTGCTAGCACCAAGGGCCCCTCCGTGTTT | CGGCAGGAGGTGGGGC |
| | GGAGGTAGTGGCGGTGGTGGTTCAGGTGGTGGT | CCACTGGCTCCTAGCAGCAAGAGCACAAGCGGA | CAGGAGTACAACCTTA |
| | GGATCTCAGGCTGTGGTTACCCAGGAGCCTAGC | GGAACAGCCGCTCTGGGCTGTCTGGTCAAGGAC | CAATCAACAACCTGCA |
| | CTGACAGTTTCTCCTGGCGGCACCGTGACACTG | TACTTTCCCGAGCCTGTGACCGTGTCCTGGAAT | GCCCGAGGACATCGCC |
| | ACCTGTGGATCTTCTACCGGCGCTGTGACCACC | TCTGGCGCTCTGACAAGCGGCGTGCACACCTTT | ACCTATTTCTGCCAAG |
| | GGCCATTACGCTAATTGGGTGCAGCAGAAGCCT | CCAGCTGTGCTGCAAAGCAGCGGCCTGTACTCT | TTTACGAGTTCGTGGT |
| | GGACAGGCCCCAAGAGGACTGATCGGCGGCACA | CTGAGCAGCGTGGTCACAGTGCCAAGCTCTAGC | GCCCGGCACCAGGCTG |
| | TCTAACAGAGCCCCTGGCGTCCCAGCCAGATTC | CTGGGCACCCAGACCTACATCTGCAATGTGAAC | GACCTGAAGCGGACCG |
| | TCTGGATCTCTGCTTGGCGGCAAGGCCGCTCTG | CACAAGCCTAGCAACACCAAGGTGGACAAGAAG | TGGCCGCCCCCAGCGT |
| | ACAATTTCTGGTGCTCAGCCTGAGGACGAGGCC | GTGGAACCCAAGAGCTGCGACAAGACCCACACC | GTTCATCTTCCCTCCC |
| | GAGTACTACTGTGCCCTGTGGTACTCCAACAGA | TGTCCTCCATGTCCTGCTCCAGAAGCTGCTGGC | AGCGACGAGCAGCTGA |
| | TGGGTGTTCGGCGGAGGCACCAAGCTGACAGTG | GGCCCTTCTGTGTTCCTGTTTCCTCCAAAGCCT | AGTCTGGCACCGCCAG |
| | TTGGAGCCCAAATCTTCAGACAAGACCCACACC | AAGGACACCCTGATGATCAGCAGAACCCCTGAA | CGTGGTGTGCCTGCTG |
| | TGTCCTCCATGTCCTGCTCCAGAAGCTGCTGGC | GTGACCTGCGTGGTGGTGGATGTGTCCCACGAG | AACAACTTCTACCCCC |
| | GGCCCTTCCGTGTTTCTGTTCCCTCCAAAGCCT | GATCCCGAAGTGAAGTTCAATTGGTACGTGGAC | GCGAGGCCAAGGTGCA |
| | AAGGACACCCTGATGATCAGCAGAACCCCTGAA | GGCGTGGAAGTGCACAACGCCAAGACCAAGCCT | GTGGAAGGTGGACAAC |
| | GTGACCTGCGTGGTGGTGGATGTGTCCCACGAG | AGAGAGGAACAGTACAACAGCACCTACAGAGTG | GCCCTGCAGAGCGGCA |
| | GATCCCGAAGTGAAGTTCAATTGGTACGTGGAC | GTGTCCGTGCTGACCGTGCTGCACCAGGATTGG | ACAGCCAGGAGAGCGT |
| | GGCGTGGAAGTGCACAACGCCAAGACCAAGCCT | CTGAACGGCAAAGAGTACAAGTGCAAGGTGTCC | GACCGAGCAGGACTCC |
| | AGAGAGGAACAGTACAACAGCACCTACAGAGTG | AACAAGGCCCTGCCTGCCAGCATCGAGAAAACC | AAGGACAGCACCTACA |
| | GTGTCCGTGCTGACCGTGCTGCACCAGGATTGG | ATCAGCAAGGCCAAGGGCCAGCCTAGGGAACCC | GCCTGAGCAGCACCCT |
| | CTGAACGGCAAAGAGTACAAGTGCAAGGTGTCC | CAGGTTTACACACTGCCTCCAAGCCGGGAAGAG | GACCCTGAGCAAGGCC |
| | AACAAGGCCCTGCCTGCCAGCATCGAGAAAACC | ATGACCAAGAACCAGGTGTCCCTGTGGTGCCTC | GACTACGAGAAGCACA |
| | ATCAGCAAGGCCAAGGGCCAGCCTAGGGAACCC | GTGAAGGGCTTCTACCCTTCCGATATCGCCGTG | AGGTGTACGCCTGCGA |
| | CAGGTTTACACACTGCCTCCAAGCCGGGAAGAG | GAATGGGAGAGCAATGGCCAGCCTGAGAACAAC | GGTGACCCACCAGGGA |
| | ATGACCAAGAACCAGGTGTCCCTGAGCTGTGCC | TACAAGACAACCCCTCCTGTGCTGGACAGCGAC | CTGTCTAGCCCCGTGA |
| | GTGAAGGGCTTCTACCCTTCCGATATCGCCGTG | GGCTCATTCTTCCTGTACAGCAAGCTGACAGTG | CCAAGAGCTTCAACCG |
| | GAATGGGAGAGCAATGGCCAGCCTGAGAACAAC | GACAAGTCCAGATGGCAGCAGGGCAACGTGTTC | GGGCGAGTGC |
| | TACAAGACAACCCCTCCTGTGCTGGACAGCGAC | AGCTGCAGCGTGATGCACGAGGCCCTGCACAAC | |
| | GGCTCATTCTTCCTGGTGTCCAAGCTGACAGTG | CACTACACCCAGAAGTCCCTGAGCCTGTCTCCT | |
| | GACAAGTCCAGATGGCAGCAGGGCAACGTGTTC | GGCAAA | |
| | AGCTGCAGCGTGATGCACGAGGCCCTGCACAAC | | |
| | CGGTACACCCAGAAGTCCCTGTCTCTGAGCCCC | | |
| | GGCAAA | | |
| 443 | SEQ ID NO: 1021 | SEQ ID NO: 1022 | SEQ ID NO: 1023 |
| hPGT1 | GAGGTGCAGCTGGTGGAATCTGGCGGAGGATTG | CAGATGCAGCTGCAGGAATCTGGCCCTGGCCTC | AGCGACATCAGCGTGG |
| 21.66 | GTTCAGCCTGGCGGCTCTCTGAGACTGTCTTGT | GTGAAGCCCTCCGAGACACTGTCCCTGACCTGC | CCCCAGGCGAGACCGC |
| AAS + | GCCGCTTCTGGCTTCACCTTCAACACCTACGCC | TCTGTGTCCGGCGCCTCCATCTCCGACTCCTAC | CAGGATCAGCTGCGGC |
| W/huSP | ATGAACTGGGTCCGACAGGCTCCTGGCAAAGGC | TGGTCTTGGATCCGGCGATCCCCTGGCAAGGGC | GAGAAGAGCCTGGGCA |
| 34.3.13 | CTGGAATGGGTCGGACGGATCCGGTCCAAGTAC | CTGGAATGGATCGGCTACGTGCACAAGTCCGGC | GCAGGGCCGTGCAATG |
| scFv | AACAATTACGCCACCTACTACGCCGACTCCGTG | GACACCAACTACAATCCCAGCCTGAAGTCCAGA | GTATCAGCACAGGGCA |
| AAS + | AAGGGCAGATTCACCATCTCTCGGGACGACTCC | GTGCACCTGTCCCTGGACACCTCCAAGAACCAG | GGCCAGGCCCCCAGCC |
| SAV + R | AAGAACTCCCTGTACCTGCAGATGAACAGCCTG | GTGTCCCTGTCTCTGACTGGTGTCACCGCTGCT | TGATCATCTACAACAA |
| | CGGACCGAGGATACCGCCGTGTACTATTGTGTG | GACTCCGGCAAGTACTACTGCGCCAGAACCCTG | CCAGGACAGGCCCAGC |
| | CGGCACGGCAACTTCGGCCACTCCTATGTGTCT | CACGGCAGACGGATCTACGGCATCGTGGCCTTC | GGCATCCCCGAGAGGT |
| | TGGTTTGCCTACTGGGGCCAGGGCACACTGGTC | AACGAGTGGTTCACCTACTTCTACATGGACGTG | TCAGTGGCAGCCCCGA |
| | ACAGTTTCTTCCGGCGGAGGTGGAAGCGGAGGC | TGGGGCACCGGCACCCAAGTGACCGTGTCCTCT | CTTCAGGCCCGGTACC |
| | GGAGGTAGTGGCGGTGGTGGTTCAGGTGGTGGT | GCCTCTACAAAGGGCCCTAGTGTGTTCCCTCTG | ACAGCCACCCTGACCA |
| | GGATCTCAGGCTGTGGTTACCCAGGAGCCTAGC | GCTCCCAGCAGCAAGTCTACATCTGGCGGAACA | TCACCTCAGTGGAGGC |
| | CTGACAGTTTCTCCTGGCGGCACCGTGACACTG | GCCGCTCTGGGCTGCCTGGTCAAGGATTACTTT | CGGTGACGAGGCCGAC |
| | ACCTGTGGATCTTCTACCGGCGCTGTGACCACC | CCCGAGCCTGTGACCGTGTCCTGGAATTCTGGC | TACTACTGCCATATCT |
| | GGCCATTACGCTAATTGGGTGCAGCAGAAGCCT | GCTCTGACAAGCGGCGTGCACACCTTTCCAGCT | GGGACAGCAGAGTTCC |
| | GGACAGGCCCCAAGAGGACTGATCGGCGGCACA | GTGCTGCAAAGCAGCGGCCTGTACTCTCTGAGC | CACCAAGTGGGTCTTT |
| | TCTAACAGAGCCCCTGGCGTCCCAGCCAGATTC | AGCGTGGTCACAGTGCCTAGCTCTAGCCTGGGC | GGAGGCGGAACCACCT |
| | TCTGGATCTCTGCTTGGCGGCAAGGCCGCTCTG | ACCCAGACCTACATCTGCAATGTGAACCACAAG | TGACCGTGCTGGGACA |
| | ACAATTTCTGGTGCTCAGCCTGAGGACGAGGCC | CCTAGCAACACCAAGGTGGACAAGAAGGTGGAA | GCCTAAGGCCGCTCCT |
| | GAGTACTACTGTGCCCTGTGGTACTCCAACAGA | CCCAAGAGCTGCGACAAGACCCACACCTGTCCT | TCCGTGACCCTGTTCC |
| | TGGGTGTTCGGCGGAGGCACCAAGCTGACAGTG | CCATGTCCTGCTCCAGAAGCTGCTGGCGGCCCT | CTCCATCCTCCGAGGA |
| | TTGGAGCCCAAATCTTCAGACAAGACCCACACC | TCCGTGTTTCTGTTCCCTCCAAAGCCTAAGGAC | ACTGCAGGCCAACAAG |
| | TGTCCTCCATGTCCTGCTCCAGAAGCTGCTGGC | ACCCTGATGATCAGCAGAACCCCTGAAGTGACC | GCCACCCTCGTGTGCC |
| | GGCCCTTCCGTGTTTCTGTTCCCTCCAAAGCCT | TGCGTGGTGGTGGATGTGTCCCACGAGGATCCC | TGATCTCCGACTTCTA |
| | AAGGACACCCTGATGATCAGCAGAACCCCTGAA | GAAGTGAAGTTCAATTGGTACGTGGACGGCGTG | CCCTGGCGCCGTGACC |
| | GTGACCTGCGTGGTGGTGGATGTGTCCCACGAG | GAAGTGCACAACGCCAAGACCAAGCCTAGAGAG | GTGGCCTGGAAGGCTG |
| | GATCCCGAAGTGAAGTTCAATTGGTACGTGGAC | GAACAGTACAACAGCACCTACAGAGTGGTGTCC | ATAGCTCTCCTGTGAA |
| | GGCGTGGAAGTGCACAACGCCAAGACCAAGCCT | GTGCTGACCGTGCTGCACCAGGATTGGCTGAAC | GGCCGGCGTGGAAACC |
| | AGAGAGGAACAGTACAACAGCACCTACAGAGTG | GGCAAAGAGTACAAGTGCAAGGTGTCCAACAAG | ACCACCCCTTCCAAGC |
| | GTGTCCGTGCTGACCGTGCTGCACCAGGATTGG | GCCCTGCCTGCCAGCATCGAGAAAACCATCAGC | AGTCCAACAACAAATA |
| | CTGAACGGCAAAGAGTACAAGTGCAAGGTGTCC | AAGGCCAAGGGCCAGCCTAGGGAACCCCAGGTT | CGCCGCCTCCTCCTAC |
| | AACAAGGCCCTGCCTGCCAGCATCGAGAAAACC | TACACACTGCCTCCAAGCCGGGAAGAGATGACC | CTGTCCCTGACCCCTG |
| | ATCAGCAAGGCCAAGGGCCAGCCTAGGGAACCC | AAGAACCAGGTGTCCCTGTGGTGTCTGGTGAAG | AGCAGTGGAAGTCCCA |
| | CAGGTTTACACACTGCCTCCAAGCCGGGAAGAG | GGCTTCTACCCTTCCGATATCGCCGTGGAATGG | CCGGTCCTACAGCTGC |
| | ATGACCAAGAACCAGGTGTCCCTGAGCTGTGCC | GAGAGCAATGGCCAGCCTGAGAACAACTACAAG | CAAGTGACCCACGAGG |
| | GTGAAGGGCTTCTACCCTTCCGATATCGCCGTG | ACAACCCCTCCTGTGCTGGACAGCGACGGCTCA | GCTCCACCGTGGAAAA |
| | GAATGGGAGAGCAATGGCCAGCCTGAGAACAAC | TTCTTCCTGTACTCCAAGCTGACAGTGGACAAG | GACCGTGGCTCCTACC |
| | TACAAGACAACCCCTCCTGTGCTGGACAGCGAC | TCCAGATGGCAGCAGGGCAACGTGTTCAGCTGC | GAGTGCTCC |
| | GGCTCATTCTTCCTGGTGTCCAAGCTGACAGTG | AGCGTGATGCACGAGGCCCTGCACAACCACTAC | |
| | GACAAGTCCAGATGGCAGCAGGGCAACGTGTTC | ACCCAGAAGTCCCTGTCTCTGAGCCCCGGCAAA | |
| | AGCTGCAGCGTGATGCACGAGGCCCTGCACAAC | | |
| | CGGTACACCCAGAAGTCCCTGTCTCTGAGCCCC | | |
| | GGCAAA | | |
| 444 | SEQ ID NO: 1024 | SEQ ID NO: 1025 | SEQ ID NO: 1023 |
| hPGT1 | GAGGTGCAGCTGGTGGAATCTGGCGGAGGATTG | CAGATGCAGCTGCAGGAATCTGGCCCTGGCCTC | AGCGACATCAGCGTGG |
| 21.66 | GTTCAGCCTGGCGGCTCTCTGAGACTGTCTTGT | GTGAAGCCCTCCGAGACACTGTCCCTGACCTGC | CCCCAGGCGAGACCGC |
| AAS + | GCCGCTTCTGGCTTCACCTTCAACACCTACGCC | TCTGTGTCCGGCGCCTCCATCTCCGACTCCTAC | CAGGATCAGCTGCGGC |
| W/huSP | ATGAACTGGGTCCGACAGGCTCCTGGCAAAGGC | TGGTCTTGGATCCGGCGATCCCCTGGCAAGGGC | GAGAAGAGCCTGGGCA |
| 34.39.13 | CTGGAATGGGTCGGACGGATCCGGTCCAAGTAC | CTGGAATGGATCGGCTACGTGCACAAGTCCGGC | GCAGGGCCGTGCAATG |
| scFv | AACAATTACGCCACCTACTACGCCGACTCCGTG | GACACCAACTACAATCCCAGCCTGAAGTCCAGA | GTATCAGCACAGGGCA |
| AAS + | AAGAGCAGATTCACCATCTCTCGGGACGACTCC | GTGCACCTGTCCCTGGACACCTCCAAGAACCAG | GGCCAGGCCCCCAGCC |
| SAV + R | AAGAACTCCCTGTACCTGGAGATGAACAGCCTG | GTGTCCCTGTCTCTGACTGGTGTCACCGCTGCT | TGATCATCTACAACAA |
| | CGGACCGAGGATACCGCCGTGTACTATTGTGTG | GACTCCGGCAAGTACTACTGCGCCAGAACCCTG | CCAGGACAGGCCCAGC |
| | CGGCACGGCAACTTCGGCCACTCCTATGTGTCT | CACGGCAGACGGATCTACGGCATCGTGGCCTTC | GGCATCCCCGAGAGGT |
| | TGGTTTGCCTACTGGGGCCAGGGCACACTGGTC | AACGAGTGGTTCACCTACTTCTACATGGACGTG | TCAGTGGCAGCCCCGA |
| | ACAGTTTCTTCCGGCGGAGGTGGAAGCGGAGGC | TGGGGCACCGGCACCCAAGTGACCGTGTCCTCT | CTTCAGGCCCGGTACC |
| | GGAGGTAGTGGCGGTGGTGGTTCAGGTGGTGGT | GCCTCTACAAAGGGCCCTAGTGTGTTCCCTCTG | ACAGCCACCCTGACCA |
| | GGATCTCAGGCTGTGGTTACCCAGGAGCCTAGC | GCTCCCAGCAGCAAGTCTACATCTGGCGGAACA | TCACCTCAGTGGAGGC |
| | CTGACAGTTTCTCCTGGCGGCACCGTGACACTG | GCCGCTCTGGGCTGCCTGGTCAAGGATTACTTT | CGGTGACGAGGCCGAC |
| | ACCTGTGGATCTTCTACCGGCGCTGTGACCACC | CCCGAGCCTGTGACCGTGTCCTGGAATTCTGGC | TACTACTGCCATATCT |
| | GGCCATTACGCTAATTGGGTGCAGCAGAAGCCT | GCTCTGACAAGCGGCGTGCACACCTTTCCAGCT | GGGACAGCAGAGTTCC |
| | GGACAGGCCCCAAGAGGACTGATCGGCGGCACA | GTGCTGCAAAGCAGCGGCCTGTACTCTCTGAGC | CACCAAGTGGGTCTTT |
| | TCTAACAGAGCCCCTGGCGTCCCAGCCAGATTC | AGCGTGGTCACAGTGCCTAGCTCTAGCCTGGGC | GGAGGCGGAACCACCT |
| | TCTGGATCTCTGCTTGGCGGCAAGGCCGCTCTG | ACCCAGACCTACATCTGCAATGTGAACCACAAG | TGACCGTGCTGGGACA |
| | ACAATTTCTGGTGCTCAGCCTGAGGACGAGGCC | CCTAGCAACACCAAGGTGGACAAGAAGGTGGAA | GCCTAAGGCCGCTCCT |
| | GAGTACTACTGTGCCCTGTGGTACTCCAACAGA | CCCAAGAGCTGCGACAAGACCCACACCTGTCCT | TCCGTGACCCTGTTCC |
| | TGGGTGTTCGGCGGAGGCACCAAGCTGACAGTG | CCATGTCCTGCTCCAGAAGCTGCTGGCGGCCCT | CTCCATCCTCCGAGGA |
| | TTGGAGCCCAAATCTTCAGACAAGACCCACACC | TCCGTGTTTCTGTTCCCTCCAAAGCCTAAGGAC | ACTGCAGGCCAACAAG |
| | TGTCCTCCATGTCCTGCTCCAGAAGCTGCTGGC | ACCCTGATGATCAGCAGAACCCCTGAAGTGACC | GCCACCCTCGTGTGCC |
| | GGCCCTTCCGTGTTTCTGTTCCCTCCAAAGCCT | TGCGTGGTGGTGGATGTGTCCCACGAGGATCCC | TGATCTCCGACTTCTA |
| | AAGGACACCCTGATGATCAGCAGAACCCCTGAA | GAAGTGAAGTTCAATTGGTACGTGGACGGCGTG | CCCTGGCGCCGTGACC |
| | GTGACCTGCGTGGTGGTGGATGTGTCCCACGAG | GAAGTGCACAACGCCAAGACCAAGCCTAGAGAG | GTGGCCTGGAAGGCTG |
| | GATCCCGAAGTGAAGTTCAATTGGTACGTGGAC | GAACAGTACAACAGCACCTACAGAGTGGTGTCC | ATAGCTCTCCTGTGAA |
| | GGCGTGGAAGTGCACAACGCCAAGACCAAGCCT | GTGCTGACCGTGCTGCACCAGGATTGGCTGAAC | GGCCGGCGTGGAAACC |
| | AGAGAGGAACAGTACAACAGCACCTACAGAGTG | GGCAAAGAGTACAAGTGCAAGGTGTCCAACAAG | ACCACCCCTTCCAAGC |
| | GTGTCCGTGCTGACCGTGCTGCACCAGGATTGG | GCCCTGCCTGCCAGCATCGAGAAAACCATCAGC | AGTCCAACAACAAATA |
| | CTGAACGGCAAAGAGTACAAGTGCAAGGTGTCC | AAGGCCAAGGGCCAGCCTAGGGAACCCCAGGTT | CGCCGCCTCCTCCTAC |
| | AACAAGGCCCTGCCTGCCAGCATCGAGAAAACC | TACACACTGCCTCCAAGCCGGGAAGAGATGACC | CTGTCCCTGACCCCTG |
| | ATCAGCAAGGCCAAGGGCCAGCCTAGGGAACCC | AAGAACCAGGTGTCCCTGTGGTGTCTGGTGAAG | AGCAGTGGAAGTCCCA |
| | CAGGTTTACACACTGCCTCCAAGCCGGGAAGAG | GGCTTCTACCCTTCCGATATCGCCGTGGAATGG | CCGGTCCTACAGCTGC |
| | ATGACCAAGAACCAGGTGTCCCTGAGCTGTGCC | GAGAGCAATGGCCAGCCTGAGAACAACTACAAG | CAAGTGACCCACGAGG |
| | GTGAAGGGCTTCTACCCTTCCGATATCGCCGTG | ACAACCCCTCCTGTGCTGGACAGCGACGGCTCA | GCTCCACCGTGGAAAA |
| | GAATGGGAGAGCAATGGCCAGCCTGAGAACAAC | TTCTTCCTGTACTCCAAGCTGACAGTGGACAAG | GACCGTGGCTCCTACC |
| | TACAAGACAACCCCTCCTGTGCTGGACAGCGAC | TCCAGATGGCAGCAGGGCAACGTGTTCAGCTGC | GAGTGCTCC |
| | GGCTCATTCTTCCTGGTGTCCAAGCTGACAGTG | AGCGTGATGCACGAGGCCCTGCACAACCACTAC | |
| | GACAAGTCCAGATGGCAGCAGGGCAACGTGTTC | ACCCAGAAGTCCCTGTCTCTGAGCCCCGGCAAA | |
| | AGCTGCAGCGTGATGCACGAGGCCCTGCACAAC | | |
| | CGGTACACCCAGAAGTCCCTGTCTCTGAGCCCC | | |
| | GGCAAA | | |

[0241] In some embodiments, the one or more polynucleotides encoding the antibodies or antigen-binding fragments, described herein, are formulated or encapsulated in a lipoplex, e.g., a lipid nanoparticle (LNP). As used herein, a “lipoplex” refers to cationic liposomes that are nonviral (synthetic) lipid carriers of DNA. In some embodiments the lipoplex is a lipid nanoparticle (LNP). As used herein, the term “lipid nanoparticle” refers to one or more spherical nanoparticles with an average diameter of between 10 to 1000 nanometers, and which comprise a solid lipid core matrix that can solubilize lipophilic molecules. In certain embodiments, the lipid core is stabilized by surfactants (e.g., emulsifiers), and can comprise one or more of triglycerides (e.g., tristearin), diglycerides (e.g., glycerol bahenate), monoglycerides (e.g., glycerol monostearate), fatty acids (e.g., stearic acid), steroids (e.g., cholesterol), and waxes (e.g., cetyl palmitate), including combinations thereof. Lipid nanoparticles are described, for example, in Petrilli et al., Curr Pharm Biotechnol. 15:847-55, 2014; and U.S. Pat. Nos. 6,217,912; 6,881,421; 7,402,573; 7,404,969; 7,550,441; 7,727,969; 8,003,621; 8,691,750; 8,871,509; 9,017,726; 9,173,853; 9,220,779; 9,227,917; and 9,278,130, each of which is incorporated by reference in its entirety. LNP-encapsulated mRNA molecules encoding a broadly neutralizing antibody are described, e.g., in Pardi, et al., Nat Commun. (2017) 8:14630. In certain embodiments, the one or more polynucleotides encoding the antibodies or antigen-binding fragments, described herein, are formulated or encapsulated in an LNP comprised of an ionizable cationic lipid/phosphatidylcholine/cholesterol/PEG-lipid, e.g., in molar ratios of about 50:10:38.5:1.5 mol mol⁻¹, respectively.

### 7. Vectors and Host Cells

[0242] Further provided are vectors comprising one or more polynucleotides encoding one or more of the multi-specific antigen binding molecules, described herein. A vector can be of any type, for example, a recombinant vector such as an expression vector. Vectors include, but are not limited to, plasmids, cosmids, bacterial artificial chromosomes (BAC) and yeast artificial chromosomes (YAC) and vectors derived from bacteriophages or plant or animal (including human) viruses. Vectors can comprise an origin of replication recognized by the proposed host cell (e.g., including prokaryotic and eukaryotic host cells) and in the case of expression vectors, promoter and other regulatory regions recognized by the host cell. In additional embodiments, a vector comprises a polynucleotide encoding an antibody of the disclosure operably linked to a promoter and optionally additional regulatory elements. Certain vectors are capable of autonomous replication in a host into which they are introduced (e.g., vectors having a bacterial origin of replication can replicate in bacteria). Other vectors can be integrated into the genome of a host upon introduction into the host, and thereby are replicated along with the host genome. Vectors include, but are not limited to, those suitable for recombinant production of the antibodies disclosed herein.

[0243] The choice of the vector is dependent on the recombinant procedures followed and the host used. Introduction of vectors into host cells can be effected by inter alia calcium phosphate transfection, virus infection, DEAE-dextran-mediated transfection, lipofectamine transfection or electroporation. Vectors may be autonomously replicating or may replicate together with the chromosome into which they have been integrated. In certain embodiments, the vectors contain one or more selection markers. The choice of the markers may depend on the host cells of choice. These include, but are not limited to, kanamycin, neomycin, puromycin, hygromycin, zeocin, ampicillin (AmpR), thymidine kinase gene from Herpes simplex virus (HSV-TK), mammalian glutamine synthetase (GS) and dihydrofolate reductase gene from mouse (dhfr). Vectors comprising one or more nucleic acid molecules encoding the antibodies described herein, operably linked to one or more nucleic acid molecules encoding proteins or peptides that can be used to isolate the antibodies, are also covered by the disclosure. These proteins or peptides include, but are not limited to, glutathione-S-transferase, maltose binding protein, metal-binding polyhistidine, green fluorescent protein, luciferase and beta-galactosidase. In other embodiments, the vector that is used is or is based on pcDNA™3.1+ (ThermoFisher, MA) or pCGS3. In various embodiments, the vector can have one, two, three, four or five open reading frames or expression cassettes. In various embodiments, the vector can have one, two, three, four or five cistrons. In some embodiments, the first, second and third expression cassettes (e.g., as set forth below) each comprise a promoter of identical or equivalent transcription strength. In varying embodiments, the promoter is a constitutive promoter. In some embodiments, the first, second and third expression cassettes (e.g., as set forth below) comprise one or more promoters of different transcription strength. Illustrative promoters of use include without limitation cytomegalovirus (CMV), SV40, RSV, EF1a, UBC, PGK and CAGG (see, e.g., Qin, et al., PLoS One. (2010) 5(5):e10611). In embodiments, the expression vector further comprises a fourth expression cassette positioned 5′ to the first expression cassette comprising a polynucleotide encoding a eukaryotic selection marker protein, e.g., glutamine synthetase (GS). Generally, the promoter driving expression of the polynucleotide encoding a eukaryotic selection marker protein (fourth expression cassette) has a relatively weaker transcription strength in comparison to the promoters driving expression of the polynucleotide in the first, second and third expression cassettes.

[0244] In some embodiments, the expression vector or expression vectors comprise a plasmid vector or a viral vector. In some embodiments, the expression vector comprises three, four or five expression cassettes or cistrons. In some embodiments, the expression vector comprises, optionally in sequential order from 5′ to 3′: (i) a first expression cassette comprising a first polynucleotide encoding an anti-HIV gp120 VL-light chain constant domain (CL) fusion protein; (ii) a second expression cassette comprising a second polynucleotide encoding an anti-HIV gp120 VH-Fc fusion protein; and (iii) a third expression cassette comprising a third polynucleotide encoding an anti-CD3 scFv-Fc fusion protein. In some embodiments, the anti-HIV gp120 VL-CL fusion protein, the anti-HIV gp120 VH-Fc fusion protein and the anti-CD3 scFv-Fc fusion protein comprise amino acid sequences set forth, respectively, or comprise amino acid sequences that are at least 80%, at least 85%, at least 90%, at least 91%, at least 92%, at least 93%, at least 94%, at least 95%, at least 96%, at least 97%, at least 98%, or at least 99% identical to the amino acid sequences set forth, respectively: SEQ ID NOs: 802, 801 and 800; SEQ ID NOs: 802, 803 and 800; SEQ ID NOs: 802, 803 and 804; SEQ ID NOs: 802, 805 and 804; SEQ ID NOs: 802, 801 and 806; SEQ ID NOs: 802, 803 and 806; SEQ ID NOs: 802, 803 and 807; SEQ ID NOs: 802, 805 and 807; SEQ ID NOs: 802, 809 and 808; SEQ ID NOs: 802, 810 and 808; SEQ ID NOs: 802, 801 and 811; SEQ ID NOs: 802, 809 and 812; SEQ ID NOs: 802, 810 and 812; SEQ ID NOs: 802, 805 and 813; SEQ ID NOs: 802, 814 and 812; SEQ ID NOs: 802, 801 and 815; SEQ ID NOs: 802, 805 and 816; SEQ ID NOs: 802, 801 and 817; SEQ ID NOs: 802, 805 and 818; SEQ ID NOs: 802, 810 and 819; SEQ ID NOs: 802, 810 and 820; SEQ ID NOs: 823, 822 and 821; SEQ ID NOs: 823, 825 and 824; SEQ ID NOs: 823, 825 and 826; SEQ ID NOs: 823, 827 and 826; SEQ ID NOs: 823, 829 and 828; SEQ ID NOs: 823, 822 and 830; SEQ ID NOs: 823, 825 and 830; SEQ ID NOs: 823, 825 and 831; SEQ ID NOs: 823, 827 and 831; SEQ ID NOs: 823, 833 and 832; SEQ ID NOs: 823, 829 and 832; SEQ ID NOs: 823, 827 and 834; SEQ ID NOs: 823, 829 and 835; SEQ ID NOs: 823, 829 and 836; SEQ ID NOs: 823, 833 and 837; SEQ ID NOs: 823, 838 and 837; SEQ ID NOs: 823, 840 and 839; SEQ ID NOs: 823, 829 and 841; SEQ ID NOs: 823, 829 and 842; SEQ ID NOs: 823, 829 and 843; SEQ ID NOs: 823, 829 and 844; SEQ ID NOs: 823, 829 and 845; SEQ ID NOs: 823, 829 and 846; SEQ ID NOs: 823, 833 and 846; SEQ ID NOs: 823, 838 and 846; SEQ ID NOs: 823, 827 and 847; SEQ ID NOs: 823, 829 and 848; SEQ ID NOs: 823, 829 and 849; SEQ ID NOs: 823, 829 and 850; SEQ ID NOs: 823, 829 and 851; SEQ ID NOs: 823, 829 and 852; SEQ ID NOs: 823, 829 and 853; SEQ ID NOs: 823, 829 and 854; SEQ ID NOs: 823, 829 and 855; SEQ ID NOs: 823, 829 and 856; SEQ ID NOs: 823, 829 and 857; SEQ ID NOs: 823, 829 and 858; SEQ ID NOs: 823, 829 and 859; SEQ ID NOs: 823, 829 and 860; SEQ ID NOs: 863, 862 and 861; SEQ ID NOs: 863, 864 and 861; SEQ ID NOs: 863, 864 and 865; SEQ ID NOs: 863, 866 and 865; SEQ ID NOs: 863, 868 and 867; SEQ ID NOs: 863, 862 and 869; SEQ ID NOs: 863, 864 and 869; SEQ ID NOs: 863, 864 and 870; SEQ ID NOs: 863, 866 and 870; SEQ ID NOs: 863, 872 and 871; SEQ ID NOs: 863, 868 and 871; SEQ ID NOs: 863, 862 and 873; SEQ ID NOs: 863, 866 and 874; SEQ ID NOs: 863, 872 and 875; SEQ ID NOs: 863, 868 and 875; SEQ ID NOs: 863, 876 and 875; SEQ ID NOs: 863, 862 and 877; SEQ ID NOs: 863, 866 and 878; SEQ ID NOs: 863, 862 and 879; SEQ ID NOs: 863, 866 and 880; SEQ ID NOs: 883, 882 and 881; SEQ ID NOs: 883, 884 and 881; SEQ ID NOs: 883, 884 and 885; SEQ ID NOs: 883, 886 and 885; SEQ ID NOs: 883, 888 and 887; SEQ ID NOs: 883, 882 and 889; SEQ ID NOs: 883, 884 and 889; SEQ ID NOs: 883, 884 and 890; SEQ ID NOs: 883, 886 and 890; SEQ ID NOs: 883, 892 and 891; SEQ ID NOs: 883, 888 and 891; SEQ ID NOs: 883, 882 and 883; SEQ ID NOs: 883, 886 and 894; SEQ ID NOs: 883, 892 and 895; SEQ ID NOs: 883, 888 and 895; SEQ ID NOs: 883, 896 and 895; SEQ ID NOs: 883, 882 and 897; SEQ ID NOs: 883, 886 and 898; SEQ ID NOs: 883, 882 and 899; or SEQ ID NOs: 883, 886 and 900.

[0245] In some embodiments, the expression vector comprises, optionally in sequential order from 5′ to 3′: (i) a first expression cassette comprising a first polynucleotide encoding an anti-CD3 VL-CL fusion protein; (ii) a second expression cassette comprising a second polynucleotide encoding an anti-CD3 VH-Fc fusion protein; and (iii) a third expression cassette comprising a third polynucleotide encoding a CD4 extracellular (EC) domain-Fc fusion protein. In some embodiments, the anti-CD3 VL-CL fusion protein, the anti-CD3 VH-Fc fusion protein and the CD4 EC domain-Fc fusion protein comprise amino acid sequences set forth, respectively, below, or comprise amino acid sequences that are at least 80%, at least 85%, at least 90%, at least 91%, at least 92%, at least 93%, at least 94%, at least 95%, at least 96%, at least 97%, at least 98%, or at least 99% identical to the amino acid sequences set forth, respectively, below: SEQ ID NOs: 753, 752 and 751; SEQ ID NOs: 753, 752 and 754; SEQ ID NOs: 753, 756 and 755; SEQ ID NOs: 753, 757 and 755; SEQ ID NOs: 753, 757 and 758; SEQ ID NOs: 753, 756 and 759; SEQ ID NOs: 761, 760 and 754; SEQ ID NOs: 761, 760 and 762; SEQ ID NOs: 753, 763 and 751; SEQ ID NOs: 753, 752 and 764; SEQ ID NOs: 753, 752 and 765; SEQ ID NOs: 753, 767 and 766; SEQ ID NOs: 753, 768 and 766; SEQ ID NOs: 753, 768 and 769; SEQ ID NOs: 753, 767 and 770; SEQ ID NOs: 761, 771 and 765; SEQ ID NOs: 761, 771 and 772; SEQ ID NOs: 776, 775 and 774; SEQ ID NOs: 776, 778 and 777; SEQ ID NOs: 776, 778 and 779; SEQ ID NOs: 776, 780 and 779; SEQ ID NOs: 776, 781 and 777; SEQ ID NOs: 753, 752 and 782; SEQ ID NOs: 753, 752 and 783; SEQ ID NOs: 753, 785 and 784; SEQ ID NOs: 753, 786 and 784; SEQ ID NOs: 753, 786 and 787; SEQ ID NOs: 753, 785 and 788; SEQ ID NOs: 761, 789 and 783; SEQ ID NOs: 761, 789 and 790; SEQ ID NOs: 794, 793 and 792; SEQ ID NOs: 794, 796 and 795; SEQ ID NOs: 794, 796 and 797; SEQ ID NOs: 794, 798 and 797; or SEQ ID NOs: 794, 799 and 795. In some embodiments, the anti-CD3 VL-CL fusion protein, the anti-CD3 VH-Fc fusion protein and the CD4 EC domain-Fc fusion protein comprise amino acid sequences that are at least 80%, at least 85%, at least 90%, at least 91%, at least 92%, at least 93%, at least 94%, at least 95%, at least 96%, at least 97%, at least 98%, or at least 99% identical to the amino acid sequences set forth, respectively: SEQ ID NOs: 753, 752 and 751. In some embodiments, the anti-CD3 VL-CL fusion protein, the anti-CD3 VH-Fc fusion protein and the CD4 EC domain-Fc fusion protein comprise amino acid sequences set forth, respectively: SEQ ID NOs: 753, 752 and 751.

[0246] In some embodiments, the anti-CD3 VL-CL fusion protein, the anti-CD3 VH-Fc fusion protein and the CD4 EC domain-Fc fusion protein comprise amino acid sequences that are at least 80%, at least 85%, at least 90%, at least 91%, at least 92%, at least 93%, at least 94%, at least 95%, at least 96%, at least 97%, at least 98%, or at least 99% identical to the amino acid sequences set forth, respectively: SEQ ID NOs: 753, 752 and 751. In some embodiments, the anti-CD3 VL-CL fusion protein, the anti-CD3 VH-Fc fusion protein and the CD4 EC domain-Fc fusion protein comprise amino acid sequences that are at least 95% identical to the amino acid sequences set forth, respectively: SEQ ID NOs: 753, 752 and 751. In some embodiments, the anti-CD3 VL-CL fusion protein, the anti-CD3 VH-Fc fusion protein and the CD4 EC domain-Fc fusion protein comprise amino acid sequences that are at least 99% identical to the amino acid sequences set forth, respectively: SEQ ID NOs: 753, 752 and 751. In some embodiments, the anti-CD3 VL-CL fusion protein comprises an amino acid sequence that is at least 95% (e.g., 99%) identical to the amino acid sequence of SEQ ID NO: 753, the anti-CD3 VH-Fc fusion protein comprises an amino acid sequence that is at least 95% (e.g., 99%) identical to the amino acid sequence of SEQ ID NO: 752, and the CD4 EC domain-Fc fusion protein comprises an amino acid sequence that is at least 95% (e.g., 99%) identical to the amino acid sequence of SEQ ID NO: 751. In some embodiments, the anti-CD3 VL-CL fusion protein comprises an amino acid sequence that is at least 95% identical to the amino acid sequence of SEQ ID NO: 753, the anti-CD3 VH-Fc fusion protein comprises an amino acid sequence of SEQ ID NO: 752, and the CD4 EC domain-Fc fusion protein comprises an amino acid sequence that is at least 95% (e.g., 99%) identical to the amino acid sequence of SEQ ID NO: 751. In some embodiments, the anti-CD3 VL-CL fusion protein comprises an amino acid sequence that is at least 99% identical to the amino acid sequence of SEQ ID NO: 753, the anti-CD3 VH-Fc fusion protein comprises an amino acid sequence of SEQ ID NO: 752, and the CD4 EC domain-Fc fusion protein comprises an amino acid sequence that is at least 95% (e.g., 99%) identical to the amino acid sequence of SEQ ID NO: 751. In some embodiments, the anti-CD3 VL-CL fusion protein comprises an amino acid sequence of SEQ ID NO: 753, the anti-CD3 VH-Fc fusion protein comprises an amino acid sequence that is at least 95% identical to the amino acid sequence of SEQ ID NO: 752, and the CD4 EC domain-Fc fusion protein comprises an amino acid sequence that is at least 95% (e.g., 99%) identical to the amino acid sequence of SEQ ID NO: 751. In some embodiments, the anti-CD3 VL-CL fusion protein comprises an amino acid sequence of SEQ ID NO: 753, the anti-CD3 VH-Fc fusion protein comprises an amino acid sequence that is at least 99% identical to the amino acid sequence of SEQ ID NO: 752, and the CD4 EC domain-Fc fusion protein comprises an amino acid sequence that is at least 95% (e.g., 99%) identical to the amino acid sequence of SEQ ID NO: 751. In some embodiments, the anti-CD3 VL-CL fusion protein, the anti-CD3 VH-Fc fusion protein and the CD4 EC domain-Fc fusion protein comprise amino acid sequences set forth, respectively: SEQ ID NOs: 753, 752 and 751.

[0247] The disclosure also provides host cells comprising one or more recombinant polynucleotides or one or more vectors, as described herein. Any of a variety of host cells can be used. In one embodiment, a host cell is a prokaryotic cell, for example, E. coli. In another embodiment, a host cell is a eukaryotic cell, for example, a yeast cell, a plant cell, an insect cell, a mammalian cell, such as a Chinese Hamster Ovary (CHO)-based or CHO-origin cell (e.g., CHO-S, CHO DG44, ExpiCHO™, CHOZN® ZFN-modified GS−/− CHO cell line or CHO-K1, CHO-K1a cells), COS cells, BHK cells, NSO cells or Bowes melanoma cells. Examples of human host cells are, inter alia, HeLa, 911, AT1080, A549, 293, Expi293™ and HEK293T-cells.

[0248] The terms “polynucleotide” and “nucleic acid molecule” interchangeably refer to a polymeric form of nucleotides and includes both sense and anti-sense strands of RNA, cDNA, genomic DNA, and synthetic forms and mixed polymers of the above. As used herein, the term nucleic acid molecule may be interchangeable with the term polynucleotide. In some embodiments, a nucleotide refers to a ribonucleotide, deoxynucleotide or a modified form of either type of nucleotide, and combinations thereof. The terms also include, but are not limited to, single- and double-stranded forms of DNA. In addition, a polynucleotide, e.g., a cDNA or mRNA, may include either or both naturally occurring and modified nucleotides linked together by either or both of naturally occurring and non-naturally occurring nucleotide linkages. The nucleic acid molecules may be modified chemically or biochemically or may contain non-natural or derivatized nucleotide bases, as will be readily appreciated by those of skill in the art. Such modifications include, for example, labels, methylation, substitution of one or more of the naturally occurring nucleotides with an analogue, internucleotide modifications such as uncharged linkages (e.g., methyl phosphonates, phosphotriesters, phosphoramidates, carbamates, etc.), charged linkages (e.g., phosphorothioates, phosphorodithioates, etc.), pendent moieties (e.g., polypeptides), intercalators (e.g., acridine, psoralen, etc.), chelators, alkylators, and modified linkages (e.g., alpha anomeric nucleic acids, etc.). The above term is also intended to include any topological conformation, including single-stranded, double-stranded, partially duplexed, triplex, hairpinned, circular and padlocked conformations. A reference to a nucleic acid sequence encompasses its complement unless otherwise specified. Thus, a reference to a nucleic acid molecule having a particular sequence should be understood to encompass its complementary strand, with its complementary sequence. The term also includes codon-biased polynucleotides for improved expression in a desired host cell.

[0249] The term “operably linked” refers to two or more nucleic acid sequence elements that are usually physically linked and are in a functional relationship with each other. For instance, a promoter is operably linked to a coding sequence if the promoter is able to initiate or regulate the transcription or expression of a coding sequence, in which case, the coding sequence should be understood as being “under the control of” the promoter.

[0250] A “substitution,” as used herein, denotes the replacement of one or more amino acids or nucleotides by different amino acids or nucleotides, respectively.

[0251] An “isolated” nucleic acid refers to a nucleic acid molecule that has been separated from a component of its natural environment. An isolated nucleic acid includes a nucleic acid molecule contained in cells that ordinarily contain the nucleic acid molecule, but the nucleic acid molecule is present extrachromosomally or at a chromosomal location that is different from its natural chromosomal location. “Isolated nucleic acid encoding an multi-specific antigen binding domain or fragment thereof” refers to one or more nucleic acid molecules encoding first antigen binding domain, and optionally second antigen binding domain, antibody heavy and light chains (or fragments thereof), including such nucleic acid molecule(s) in a single vector or separate vectors, and such nucleic acid molecule(s) present at one or more locations in a host cell.

[0252] The term “vector,” as used herein, refers to a nucleic acid molecule capable of propagating another nucleic acid to which it is linked. The term includes the vector as a self-replicating nucleic acid structure as well as the vector incorporated into the genome of a host cell into which it has been introduced. Some vectors are suitable for delivering the nucleic acid molecule or polynucleotide of the present application. Certain vectors are capable of directing the expression of nucleic acids to which they are operatively linked. Such vectors are referred to herein as expression vectors.

[0253] The terms “host cell,” “host cell line,” and “host cell culture” are used interchangeably and refer to cells into which exogenous nucleic acid has been introduced, including the progeny of such cells. Host cells include “transformants” and “transformed cells,” which include the primary transformed cell and progeny derived therefrom without regard to the number of passages. Progeny may not be completely identical in nucleic acid content to a parent cell, but may contain mutations. Mutant progeny that have the same function or biological activity as screened or selected for in the originally transformed cell are included herein.

[0254] A polynucleotide “variant,” as the term is used herein, is a polynucleotide that typically differs from a polynucleotide specifically disclosed herein in one or more substitutions, deletions, additions and insertions. Such variants may be naturally occurring or may be synthetically generated, for example, by modifying one or more of the polynucleotide sequences described herein and evaluating one or more biological activities of the encoded polypeptide as described herein, e.g., using any of a number of techniques well known in the art.

[0255] A polypeptide “variant,” as the term is used herein, is a polypeptide that typically differs from a polypeptide specifically disclosed herein in one or more substitutions, deletions, additions and insertions. Such variants may be naturally occurring or may be synthetically generated, for example, by modifying one or more of the above polypeptide sequences described herein and evaluating one or more biological activities of the polypeptide as described herein, e.g., using any of a number of techniques well known in the art.

[0256] The term “variant” may also refer to any naturally occurring or engineered molecule comprising one or more nucleotide or amino acid mutations. In one embodiment, the multi-specific antigen binding molecule is a bispecific antigen binding molecule. In one embodiment, the multi-specific antigen binding molecule is a bispecific antibody. For example, somatic variants may encompass all related naturally occurring antibodies that are part of or derived from the same B-cell lineage. Engineered variants may encompass all single mutations or combinatorial mutations made to an antibody.

### 8. Methods of Producing Multi-Specific Antigen Binding Molecules

[0257] Multi-specific and bispecific antigen binding molecules that bind to an HIV antigen (e.g., gp120, gp41) and human CD3 (e.g., human CD3ε or human CD36) can be produced by any method known in the art for the synthesis of multi-specific antibodies, for example, by chemical synthesis or by recombinant expression techniques.

[0258] Methods of making monospecific antibodies are known. Methods of making bispecific antibodies are known and described, for example, in PCT Publ. Nos. WO2011/038290; WO2012/158818, WO2012/162067, WO2015/104346, WO2016/086189, WO2016/182751, WO2017/009442, WO2017/125897, WO2017/136659, WO2017/157305, WO2017/201493, WO2018/183139, WO2018/191438, WO2019/034580, WO2019/078697 and WO2019/143636; U.S. Pat. Nos. 5,731,168; 5,807,706; 5,821,333; and U.S. Appl. Publ. Nos. 2003/020734, 2002/0155537, 2014/242079, 2015/133640, 2016/297885 and 2017/037130. Bispecific tetravalent antibodies, and methods of making them are described, e.g., in WO 02/096948 and WO 00/44788, the disclosures of both of which are herein incorporated by reference in its entirety. In addition, other publications relating to making bispecific antibodies include WO 91/00360; WO 92/08802; WO 92/05793, and WO 93/17715; Tutt et al., J. Immunol. 147:60-69 (1991); U.S. Pat. Nos. 4,474,893; 4,714,681; 4,925,648; 5,573,920; 5,601,819, 9,212,230 and 9,701,759; and Kostelny et al., J. Immunol. 148:1547-1553 (1992). Heterodimeric bispecific antibodies having an scFv first antigen binding domain and a Fab second antigen binding domain are described, e.g., in WO 2013/163427 and in U.S. Pat. No. 9,701,759.

[0259] One method of making bispecific antibodies and the multi-specific antigen binding molecules described herein employs so-called “knobs-into-holes” technology (Ridgway et al., Protein Eng., 9:617-621 (1996); WO 2006/028936). The mispairing problem of Ig heavy chains that is a chief drawback for making bispecific antibodies is reduced in this technology by mutating selected amino acids forming the interface of the CH3 domains in IgG. At positions within the CH3 domain at which the two heavy chains interact directly, an amino acid with a small side chain (hole) is introduced into the sequence of one heavy chain and an amino acid with a large side chain (knob) into the counterpart interacting residue location on the other heavy chain. In some instances, multi-specific antigen binding molecules described herein have immunoglobulin chains in which the CH3 domains have been modified by mutating selected amino acids that interact at the interface between two polypeptides so as to preferentially form a bispecific antigen binding molecule. In some embodiments, the multi-specific antigen binding molecules can be composed of immunoglobulin chains of the same subclass or different subclasses. In one instance, a multi-specific antigen binding molecule that binds to gp120 and CD3 comprises a T366W (EU numbering) mutation in the “knobs chain” and T366S, L368A, Y407V (EU numbering) mutations in the “hole chain.” In certain embodiments, an additional interchain disulfide bridge is introduced between the CH3 domains by, e.g., introducing a Y349C mutation into the “knobs chain” and a E356C mutation or a S354C mutation into the “hole chain.” In certain embodiments, R409D, K370E mutations are introduced in the “knobs chain” and D399K, E357K mutations in the “hole chain.” In other embodiments, Y349C, T366W mutations are introduced in one of the chains and E356C, T366S, L368A, Y407V mutations in the counterpart chain. In some embodiments. Y349C, T366W mutations are introduced in one chain and S354C, T366S, L368A, Y407V mutations in the counterpart chain. In some embodiments, Y349C, T366W mutations are introduced in one chain and S354C, T366S, L368A, Y407V mutations in the counterpart chain. In yet other embodiments, Y349C, T366W mutations are introduced in one chain and S354C, T366S, L368A, Y407V mutations in the counterpart chain (all EU numbering).

[0260] Another exemplary method of making bispecific antibodies is by using the Bispecific T-cell Engagers (BiTEs®) platform. BiTEs are made by genetically fusing a first scFv (e.g., a scFv that binds gp120) to a second scFv (e.g., a scFv that binds human CD3) via a flexible peptide linker (e.g., GGGGS (SEQ ID NO: 1088)). See, e.g., Staerz et al., Nature, 314:628-631 (1985); Mack et al., PNAS, 92:7021-7025 (1995); Huehls et al., Immunol. Cell Biol., 93:290-296 (2015).

[0261] Another exemplary method of making bispecific antibodies is by using the Dual-Affinity Re-targeting (DART) platform. This technology is based on the diabody format of Holliger et al. (PNAS, 90:6444-6448 (1993)) and further improved for stability and optimal pairing of the VH and VL chains (Johnson et al., J Mol. Biol., 399: 436-449 (2010); Sung et al., J Clin Invest., 125(11): 4077-4090 (2015)).

[0262] Yet another exemplary method of making bispecific antibodies is by using the Trifunctional Hybrid Antibodies platform—Triomab®. This platform employs a chimeric construction made up of half of two full-length antibodies of different isotypes, mouse IgG2a and rat IgG2b. This technology relies on species-preferential heavy/light chain pairing associations. See, Lindhofer et al., J Immunol., 155:219-225 (1995).

[0263] A further exemplary method of making bispecific antibodies is by using the TandAb® platform. This technology is based on the diabody concept but are designed as a single polypeptide chain VH1-VL2-VH2-VL1 comprising short linkers to prevent intra-chain pairing. Head-to-tail dimerization of this single chain results in the formation of a tetravalent homodimer (Kipriyanov et al., J Mol. Biol., 293: 41-56 (1999)).

[0264] Yet another method for making bispecific antibodies is the CrossMab technology. CrossMab are chimeric antibodies constituted by the halves of two full-length antibodies. For correct chain pairing, it combines two technologies: (i) the knob-into-hole which favors a correct pairing between the two heavy chains; and (ii) an exchange between the heavy and light chains of one of the two Fabs to introduce an asymmetry which avoids light-chain mispairing. See, Ridgway et al., Protein Eng., 9:617-621 (1996); Schaefer et al., PNAS, 108:11187-11192 (2011). CrossMabs can combine two or more antigen binding domains for targeting two or more targets or for introducing bivalency towards one target such as the 2:1 format.

[0265] In various embodiments, the multi-specific antigen binding molecules described herein may be produced in bacterial or eukaryotic cells. The multi-specific antigen binding molecules can also be produced in eukaryotic cells such as transformed cell lines (e.g., CHO, CHO-S, 293E, 293T, Expi293™, COS, NIH3T3). In addition, the multi-specific antigen binding molecules described herein (e.g., Fabs, Fab-scFv, scFv's) can be expressed in a yeast cell such as Pichia (see, e.g., Powers et al., J Immunol Methods. 251:123-35 (2001)), Hanseula, or Saccharomyces. In one embodiment, the bispecific antibodies described herein are produced in a CHO-based or CHO-origin cell line (e.g., CHO-S, CHO DG44, ExpiCHO™, CHOZN® ZFN-modified GS−/− CHO cell line or CHO-K1, CHO-K1a) or a HEK293 (e.g., Expi293™) cell line. To produce the multi-specific antigen binding molecules of interest, one or more polynucleotides encoding the multi-specific antigen binding molecules is constructed, introduced into an expression vector, and then expressed in one or more suitable host cells. In some embodiments, three polynucleotides encoding an scFv heavy chain comprising the first antigen binding domain, a Fab heavy chain and a Fab light chain comprising the second antigen binding domain are co-expressed in a single host cell. In some embodiments, three polynucleotides encoding a Fab heavy chain and a Fab light chain comprising the first antigen binding domain, and an EC domain comprising the second antigen binding domain are co-expressed in a single host cell. Standard molecular biology techniques are used to prepare the recombinant expression vector, transfect the host cells, select for transformants, culture the host cells, and recover the multi-specific antigen binding molecules.

[0266] In some embodiments, the host cell predominantly sialylates N-linked glycosylation sites within the variable regions of an immunoglobulin antigen binding domain. In some embodiments, the polynucleotides encoding a multi-specific antigen binding molecule, as described herein, are expressed in a host cell that sialylates at least 50%, at least 55%, at least 60%, at least 65%, at least 70%, at least 75%, at least 80%, at least 85%, at least 90%, at least 91%, at least 92%, at least 93%, at least 94%, at least 95%, or more, N-linked glycosylation sites in the variable domains (Fv) of expressed antigen binding molecules. In various embodiments, in multi-specific antigen binding molecules expressed from such host cells, at least 50%, at least 60%, at least 70%, least 80%, at least 85%, at least 90%, or more, N-linked glycosylation sites in at least one of the first VH, the first VL, the second VH and the second VL of the multi-specific antigen binding molecule are sialylated. In various embodiments, in multi-specific antigen binding molecules expressed from such host cells, the N-linked glycosylation sites in at least one of the first VL, the second VH and the second VL have a sialic acid occupancy (e.g., a glycan comprising one or two terminal sialic acid residues) of at least 40%, at least 50%, at least 60%, at least 70%, least 80%, at least 85%, at least 90%, or more. In some embodiments, the sialylated N-linked glycosylation sites in at least one of the first VL, the second VH and the second VL of the multi-specific antigen binding molecule comprise from 1 to 5 sialic acid residues, e.g., from 1 to 4 sialic acid residues, e.g., from 1 to 3 sialic acid residues, e.g., from 1 to 2 sialic acid residues. In some embodiments, at least one of the first VL, the second VH and the second VL are sialylated with N-acetylneuraminic acid (NANA). In some embodiments, the sialic acid residues are present in biantennary structures. In some embodiments, the sialic acid residues are present in complex N-linked glycan structures. In some embodiments, the sialic acid residues are present in hybrid N-linked glycan structures. In some embodiments, the glycans are terminally sialylated.

[0267] If the multi-specific antigen binding molecules are to be expressed in bacterial cells (e.g., E. coli), the expression vector should have characteristics that permit amplification of the vector in the bacterial cells. Additionally, when E. coli such as JM109, DH5a, HB101, or XL1-Blue is used as a host, the vector must have a promoter, for example, a lacZ promoter (Ward et al., 341:544-546 (1989), araB promoter (Better et al., Science, 240:1041-1043 (1988)), or T7 promoter that can allow efficient expression in E. coli. Examples of such vectors include, for example, M13-series vectors, pUC-series vectors, pBR322, pBluescript, pCR-Script, pGEX-5X-1 (Pharmacia), “QIAexpress system” (QIAGEN), pEGFP, and pET (when this expression vector is used, the host is preferably BL21 expressing T7 RNA polymerase). The expression vector may contain a signal sequence for secretion of the multi-specific antigen binding molecules. For production into the periplasm of E. coli, the pelB signal sequence (Lei et al., J. Bacteriol., 169: 4379 (1987)) may be used as the signal sequence for secretion of the multi-specific antigen binding molecules. For bacterial expression, calcium chloride methods or electroporation methods may be used to introduce the expression vector into the bacterial cell.

[0268] If the multi-specific antigen binding molecules are to be expressed in animal cells, e.g., such as CHO-based or CHO-origin cells, COS, and NIH3T3 cells, the expression vector includes a promoter useful for expression in these cells. In various embodiments, the promoter for expression of the multi-specific antigen binding molecules in mammalian cells is a constitutive promoter or an inducible promoter. Illustrative promoters for expression of the multi-specific antigen binding molecules in mammalian cells include without limitation an SV40 promoter (Mulligan et al., Nature, 277:108 (1979)), MMLV-LTR promoter, EF1a promoter (Mizushima et al., Nucleic Acids Res., 18:5322 (1990)), or CMV promoter. In addition to the nucleic acid sequence encoding the immunoglobulin or domain thereof, the recombinant expression vectors may carry additional sequences, such as sequences that regulate replication of the vector in host cells (e.g., origins of replication) and selectable marker genes. The selectable marker gene facilitates selection of host cells into which the vector has been introduced (see e.g., U.S. Pat. Nos. 4,399,216, 4,634,665 and 5,179,017). For example, typically the selectable marker gene confers resistance to drugs, such as G418, hygromycin, or methotrexate, on a host cell into which the vector has been introduced. Examples of vectors with selectable markers include pMAM, pDR2, pBK-RSV, pBK-CMV, pOPRSV, and pOP13.

[0269] In one embodiment, the multi-specific antigen binding molecules are produced in mammalian cells. Exemplary mammalian host cells for expressing multi-specific antigen binding molecules include Chinese Hamster Ovary (CHO cells) (including dhfr-CHO cells, e.g., described in Urlaub and Chasin (1980) Proc. Natl. Acad. Sci. USA 77: 4216-4220, used with a DHFR selectable marker, e.g., as described in Kaufman and Sharp (1982) Mol. Biol. 159:601 621 and glutamine synthetase (GS)-cells used with a GS selectable marker, e.g., described in Lin, et al., MAbs. (2019) 11(5):965-976; and Noh, et al., Sci Rep. (2018) 8(1):5361), human embryonic kidney 293 cells (e.g., 293, 293E, 293T, Expi293™), COS cells, NIH3T3 cells, lymphocytic cell lines, e.g., NSO myeloma cells and SP2 cells, and a cell from a transgenic animal, e.g., a transgenic mammal. For example, the cell is a mammary epithelial cell. CHO and NSO cell lines for recombinant antibody production are reviewed by Dhara, et al., BioDrugs. (2018) 32(6):571-584.

[0270] In an exemplary system for expression of the multi-specific antigen binding molecules, recombinant expression vectors encoding the first and second binding domains (e.g., VH and VL of an anti-CD3 targeting arm and VH and VL of an anti-gp120 targeting arm) are introduced into dhfr-CHO cells by calcium phosphate-mediated transfection. In a specific embodiment, the dhfr-CHO cells are cells of the DG44 cell line, such as DG44i (see, e.g., Derouaz et al., Biochem Biophys Res Commun., (2006) 340(4):1069-77). Within the recombinant expression vectors, the immunoglobulin heavy and light chain genes are each operatively linked to enhancer/promoter regulatory elements (e.g., derived from SV40, CMV, adenovirus and the like, such as a CMV enhancer/AdMLP promoter regulatory element or an SV40 enhancer/AdMLP promoter regulatory element) to drive high levels of transcription of the genes. The recombinant expression vectors also carry a DHFR gene, which allows for selection of CHO cells that have been transfected with the vector using methotrexate selection/amplification. The selected transformant host cells are cultured to allow for expression of the immunoglobulin heavy and light chains and the multi-specific antigen binding molecule is recovered from the culture medium. In one embodiment, all three polypeptides of a bi-specific antigen binding molecule, as described herein, are expressed in a single cell. In one embodiment, all three polypeptides of a bi-specific antigen binding molecule, as described herein, are expressed in a single cell from a single vector.

[0271] The multi-specific antigen binding molecules can also be produced by a transgenic animal. For example, U.S. Pat. No. 5,849,992 describes a method of expressing an antibody in the mammary gland of a transgenic mammal. A transgene is constructed that includes a milk-specific promoter and one or more polynucleotides encoding the multi-specific antigen binding molecule of interest and a signal sequence for secretion. The milk produced by females of such transgenic mammals includes, secreted-therein, the multi-specific antigen binding molecule of interest. The multi-specific antigen binding molecule can be purified from the milk, or for some applications, used directly. Animals are also provided comprising one or more of the nucleic acids described herein.

[0272] The multi-specific antigen binding molecules can be isolated from inside or outside (such as medium) of the host cell and purified as substantially pure and homogenous, non-aggregated multi-specific antigen binding molecules (e.g., heterodimeric bispecific antigen binding molecules). As appropriate or desired, the cell or population of cells are cultured in a culture volume of at least 2L, e.g., at least 5L, 10L, 50L, 100L, 150L, 200L, 250L, or more. Methods for isolation and purification commonly used for antibody purification may be used for the isolation and purification of herein described multi-specific antigen binding molecules, and are not limited to any particular method. The multi-specific antigen binding molecules may be isolated and purified by appropriately selecting and combining, for example, column chromatography, filtration, ultrafiltration, salting out, solvent precipitation, solvent extraction, distillation, immunoprecipitation, SDS-polyacrylamide gel electrophoresis, isoelectric focusing, dialysis, and recrystallization. Chromatography includes, for example, affinity chromatography, ion exchange chromatography, hydrophobic chromatography, gel filtration, reverse-phase chromatography, and adsorption chromatography (Strategies for Protein Purification and Characterization: A Laboratory Course Manual. Ed Daniel R. Marshak et al., Cold Spring Harbor Laboratory Press, 1996). Chromatography can be carried out using liquid phase chromatography such as HPLC and FPLC. Columns used for affinity chromatography include Protein A column and protein G column. Examples of columns using Protein A column include Hyper D, POROS, and Sepharose FF (GE Healthcare Biosciences). The present disclosure also includes multi-specific antigen binding molecules that are highly purified using these purification methods. In various embodiments, the isolating or purifying step comprises Protein A chromatography, and at least 90%, 91%, 92%, 93%, 94%, 95%, 96%, 97%, 98%, 99%, or more, of the multi-specific antigen binding molecules are isolated or purified. In various embodiments, the isolating or purifying step comprises Protein A chromatography, followed by ion exchange chromatography, and at least 95%, 96%, 97%, 98%, 99%, or more, of the multi-specific antigen binding molecules are isolated or purified. In various embodiments, at least 95%, 96%, 97%, 98%, 99%, or more, of the multi-specific antigen binding molecules isolate or purify as non-aggregated soluble heterodimer as determined using size exclusion chromatography (SEC). In some embodiments, the isolated or purified multi-specific antigen binding molecules have increased homogeneity as assessed by analytical ion exchange chromatography, wherein the integrated area of a main peak representing an unmodified target species is at least 95%, 96%, 97%, 98%, or more, of the sum of all integrated protein peak areas. In some embodiments, the isolated or purified antigen binding molecules have fewer than 35%, 30%, 25%, 20%, 15%, 10%, 9%, 8%, 7%, or fewer, acidic contaminants.

### 9. Methods of Treating and Preventing HIV

[0273] Provided are methods for treating or preventing an HIV infection or a related disease or disorder in a subject in need thereof (e.g., a human subject), comprising providing to a subject in need thereof an effective amount of one or more of the multi-specific antigen binding molecules (e.g., bispecific antigen binding molecules, bispecific antibodies) described herein, or one or more polynucleotides encoding the multi-specific antigen binding molecules.

[0274] In some embodiments, the methods entail administering a multi-specific antigen binding molecule having a first antigen binding domain that binds to CD3, and a second antigen binding domain that binds to an epitope or region of gp120 in the CD4 binding site (CD4bs) and comprises one or more extracellular (EC) domains of CD4, and optionally, an IL-15 receptor agonist. In some embodiments, the one or more EC domains of CD4 comprise a sequence as set forth in SEQ ID NOs: 746-749, or a sequence that is at least 80%, at least 85%, at least 90%, at least 91%, at least 92%, at least 93%, at least 94%, at least 95%, at least 96%, at least 97%, at least 98%, or at least 99% identical to an amino acid sequence of SEQ ID NOs: 746-749 (e.g., SEQ ID NO:746). In some embodiments, the EC domain of CD4 comprises a sequence that is at least 80%, at least 85%, at least 90%, at least 91%, at least 92%, at least 93%, at least 94%, at least 95%, at least 96%, at least 97%, at least 98%, or at least 99% identical to the sequence of SEQ ID NO: 746. In some embodiments, the EC domain of CD4 comprises a sequence that is at least 95% identical to the sequence of SEQ ID NO: 746. In some embodiments, the EC domain of CD4 comprises a sequence that is at least 99% identical to the sequence of SEQ ID NO: 746. In some embodiments, the EC domain of CD4 comprises the sequence of SEQ ID NO: 746. In some embodiments, the first antigen binding domain comprises a first VH-CDR1, a first VH-CDR2, a first VH-CDR3, a first VL-CDR1, a first VL-CDR2 and a first VL-CDR3 comprising the following amino acid sequences, respectively (according to Kabat): SEQ ID NOs: 1, 11, 8, 4, 9 and 10; or SEQ ID NOs: 1, 12, 8, 4, 9 and 10; and the second antigen binding domain comprises one or more EC domains of CD4 comprising an amino acid sequence that comprises or is at least 80%, at least 85%, at least 90%, at least 91%, at least 92%, at least 93%, at least 94%, at least 95%, at least 96%, at least 97%, at least 98%, or at least 99%, identical to a CD4 EC domain selected from the group consisting of SEQ ID NOs: 746-749 (e.g., SEQ ID NO:746). In some embodiments, the first antigen binding domain comprises a first VH-CDR1, a first VH-CDR2, a first VH-CDR3, a first VL-CDR1, a first VL-CDR2 and a first VL-CDR3 comprising the following amino acid sequences, respectively (according to Kabat): SEQ ID NOs: 1, 12, 8, 4, 9 and 10; and the second antigen binding domain comprises one EC domain of CD4 comprising an amino acid sequence that is at least 80%, at least 85%, at least 90%, at least 91%, at least 92%, at least 93%, at least 94%, at least 95%, at least 96%, at least 97%, at least 98%, or at least 99%, identical to a CD4 EC domain of SEQ ID NO:746. In some embodiments, the first antigen binding domain comprises a first VH-CDR1, a first VH-CDR2, a first VH-CDR3, a first VL-CDR1, a first VL-CDR2 and a first VL-CDR3 comprising the following amino acid sequences, respectively (according to Kabat): SEQ ID NOs: 1, 12, 8, 4, 9 and 10; and the second antigen binding domain comprises one EC domain of CD4 comprising an amino acid sequence that is at least 95% identical to a CD4 EC domain of SEQ ID NO:746. In some embodiments, the first antigen binding domain comprises a first VH-CDR1, a first VH-CDR2, a first VH-CDR3, a first VL-CDR1, a first VL-CDR2 and a first VL-CDR3 comprising the following amino acid sequences, respectively (according to Kabat): SEQ ID NOs: 1, 12, 8, 4, 9 and 10; and the second antigen binding domain comprises one EC domain of CD4 comprising an amino acid sequence that is at least 99% identical to a CD4 EC domain of SEQ ID NO:746. In some embodiments, the first antigen binding domain comprises a first VH-CDR1, a first VH-CDR2, a first VH-CDR3, a first VL-CDR1, a first VL-CDR2 and a first VL-CDR3 comprising the following amino acid sequences, respectively (according to Kabat): SEQ ID NOs: 1, 12, 8, 4, 9 and 10; and the second antigen binding domain comprises one EC domain of CD4 comprising the amino acid sequence of SEQ ID NO:746. In some embodiments, the first antigen binding domain comprises a first VH-CDR1, a first VH-CDR2, a first VH-CDR3, a first VL-CDR1, a first VL-CDR2 and a first VL-CDR3 comprising the following amino acid sequences, respectively (according to Chothia): SEQ ID NOs: 17, 18, 23, 20, 24 and 25; and the second antigen binding domain comprises one or more EC domains of CD4 comprising an amino acid sequence that comprises or is at least 80%, at least 85%, at least 90%, at least 91%, at least 92%, at least 93%, at least 94%, at least 95%, at least 96%, at least 97%, at least 98%, or at least 99%, identical to a CD4 EC domain selected from the group consisting of SEQ ID NOs: 746-749 (e.g., SEQ ID NO:746). In some embodiments, the first antigen binding domain comprises a first VH-CDR1, a first VH-CDR2, a first VH-CDR3, a first VL-CDR1, a first VL-CDR2 and a first VL-CDR3 comprising the following amino acid sequences, respectively (according to Chothia): SEQ ID NOs: 17, 18, 23, 20, 24 and 25; and the second antigen binding domain comprises one EC domain of CD4 comprising an amino acid sequence is at least 95% (e.g., at least 99%) identical to a CD4 EC domain of SEQ ID NO:746. In some embodiments, the first antigen binding domain comprises a first VH-CDR1, a first VH-CDR2, a first VH-CDR3, a first VL-CDR1, a first VL-CDR2 and a first VL-CDR3 comprising the following amino acid sequences, respectively (according to Chothia): SEQ ID NOs: 17, 18, 23, 20, 24 and 25; and the second antigen binding domain comprises one EC domain of CD4 comprising the amino acid sequence of SEQ ID NO:746. In some embodiments, the first antigen binding domain comprises a first VH-CDR1, a first VH-CDR2, a first VH-CDR3, a first VL-CDR1, a first VL-CDR2 and a first VL-CDR3 comprising the following amino acid sequences, respectively (according to IMGT): SEQ ID NOs: 28, 29, 32, 31, 24 and 10; and the second antigen binding domain comprises one or more EC domains of CD4 comprising an amino acid sequence that comprises or is at least 80%, at least 85%, at least 90%, at least 91%, at least 92%, at least 93%, at least 94%, at least 95%, at least 96%, at least 97%, at least 98%, or at least 99%, identical to a CD4 EC domain selected from the group consisting of SEQ ID NOs: 746-749 (e.g., SEQ ID NO:746). In some embodiments, the first antigen binding domain comprises a first VH-CDR1, a first VH-CDR2, a first VH-CDR3, a first VL-CDR1, a first VL-CDR2 and a first VL-CDR3 comprising the following amino acid sequences, respectively (according to IMGT): SEQ ID NOs: 28, 29, 32, 31, 24 and 10; and the second antigen binding domain comprises one EC domain of CD4 comprising an amino acid sequence is at least 95% (e.g., at least 99%) identical to a CD4 EC domain of SEQ ID NO:746. In some embodiments, the first antigen binding domain comprises a first VH-CDR1, a first VH-CDR2, a first VH-CDR3, a first VL-CDR1, a first VL-CDR2 and a first VL-CDR3 comprising the following amino acid sequences, respectively (according to IMGT): SEQ ID NOs: 28, 29, 32, 31, 24 and 10; and the second antigen binding domain comprises one EC domain of CD4 comprising the amino acid sequence of SEQ ID NO:746. In some embodiments, the first antigen binding domain comprises a first VH-CDR1, a first VH-CDR2, a first VH-CDR3, a first VL-CDR1, a first VL-CDR2 and a first VL-CDR3 comprising the following amino acid sequences, respectively (according to Honegger): SEQ ID NOs: 34, 42, 40, 37, 41 and 25; or SEQ ID NOs: 34, 43, 40, 37, 41 and 25; and the second antigen binding domain comprises one or more EC domains of CD4 comprising an amino acid sequence that comprises or is at least 80%, at least 85%, at least 90%, at least 91%, at least 92%, at least 93%, at least 94%, at least 95%, at least 96%, at least 97%, at least 98%, or at least 99%, identical to a CD4 EC domain selected from the group consisting of SEQ ID NOs: 746-749 (e.g., SEQ ID NO:746). In some embodiments, the first antigen binding domain comprises a first VH-CDR1, a first VH-CDR2, a first VH-CDR3, a first VL-CDR1, a first VL-CDR2 and a first VL-CDR3 comprising the following amino acid sequences, respectively (according to Honegger): SEQ ID NOs: 34, 43, 40, 37, 41 and 25; and the second antigen binding domain comprises one EC domain of CD4 comprising an amino acid sequence that comprises or is at least 80%, at least 85%, at least 90%, at least 91%, at least 92%, at least 93%, at least 94%, at least 95%, at least 96%, at least 97%, at least 98%, or at least 99%, identical to a CD4 EC domain of SEQ ID NO:746. In some embodiments, the first antigen binding domain comprises a first VH-CDR1, a first VH-CDR2, a first VH-CDR3, a first VL-CDR1, a first VL-CDR2 and a first VL-CDR3 comprising the following amino acid sequences, respectively (according to Honegger): SEQ ID NOs: 34, 43, 40, 37, 41 and 25; and the second antigen binding domain comprises one EC domain of CD4 comprising an amino acid sequence is at least 95% (e.g., at least 99%) identical to a CD4 EC domain of SEQ ID NO:746. In some embodiments, the first antigen binding domain comprises a first VH-CDR1, a first VH-CDR2, a first VH-CDR3, a first VL-CDR1, a first VL-CDR2 and a first VL-CDR3 comprising the following amino acid sequences, respectively (according to Honegger): SEQ ID NOs: 34, 43, 40, 37, 41 and 25; and the second antigen binding domain comprises one EC domain of CD4 comprising the amino acid sequence of SEQ ID NO:746. In some embodiments, the first antigen binding domain comprises a first VH and a first VL comprising the amino acid sequences set forth, respectively, or comprising amino acid sequences that are at least 80%, at least 85%, at least 90%, at least 91%, at least 92%, at least 93%, at least 94%, at least 95%, at least 96%, at least 97%, at least 98%, or at least 99% identical to the amino acid sequences set forth, respectively: SEQ ID NOs: 49 and 55; SEQ ID NOs: 50 and 55; SEQ ID NOs: 50 and 56; SEQ ID NOs: 51 and 55; or SEQ ID NOs: 51 and 56; and the second antigen binding domain comprises one or more EC domains of CD4 comprising an amino acid sequence that comprises or is at least 80%, at least 85%, at least 90%, at least 91%, at least 92%, at least 93%, at least 94%, at least 95%, at least 96%, at least 97%, at least 98%, or at least 99%, identical to a CD4 EC domain selected from the group consisting of SEQ ID NOs: 746-749 (e.g., SEQ ID NO:746). In some embodiments, the first antigen binding domain comprises a first VH and a first VL comprising amino acid sequences that are at least 80%, at least 85%, at least 90%, at least 91%, at least 92%, at least 93%, at least 94%, at least 95%, at least 96%, at least 97%, at least 98%, or at least 99% identical to the amino acid sequences set forth, respectively: SEQ ID NOs: 51 and 56; and the second antigen binding domain comprises one EC domain of CD4 comprising an amino acid sequence that is at least 80%, at least 85%, at least 90%, at least 91%, at least 92%, at least 93%, at least 94%, at least 95%, at least 96%, at least 97%, at least 98%, or at least 99%, identical to a CD4 EC domain of SEQ ID NO:746. In some embodiments, the first antigen binding domain comprises a first VH and a first VL comprising amino acid sequences that are at least 95% identical to the amino acid sequences set forth, respectively: SEQ ID NOs: 51 and 56; and the second antigen binding domain comprises one EC domain of CD4 comprising an amino acid sequence that is at least 95% identical to a CD4 EC domain of SEQ ID NO:746. In some embodiments, the first antigen binding domain comprises a first VH and a first VL comprising amino acid sequences that are at least 95% identical to the amino acid sequences set forth, respectively: SEQ ID NOs: 51 and 56; and the second antigen binding domain comprises one EC domain of CD4 comprising an amino acid sequence that is at least 99% identical to a CD4 EC domain of SEQ ID NO:746. In some embodiments, the first antigen binding domain comprises a first VH and a first VL comprising amino acid sequences that are at least 95% identical to the amino acid sequences set forth, respectively: SEQ ID NOs: 51 and 56; and the second antigen binding domain comprises one EC domain of CD4 comprising an amino acid sequence of SEQ ID NO:746. In some embodiments, the first antigen binding domain comprises a first VH and a first VL comprising amino acid sequences that are at least 99% identical to the amino acid sequences set forth, respectively: SEQ ID NOs: 51 and 56; and the second antigen binding domain comprises one EC domain of CD4 comprising an amino acid sequence that is at least 95% identical to a CD4 EC domain of SEQ ID NO:746. In some embodiments, the first antigen binding domain comprises a first VH and a first VL comprising the amino acid sequences set forth, respectively: SEQ ID NOs: 51 and 56; and the second antigen binding domain comprises one EC domain of CD4 comprising an amino acid sequence that is at least 99% identical to a CD4 EC domain of SEQ ID NO:746. In some embodiments, the first antigen binding domain comprises a first VH and a first VL comprising amino acid sequences that are at least 99% identical to the amino acid sequences set forth, respectively: SEQ ID NOs: 51 and 56; and the second antigen binding domain comprises one EC domain of CD4 comprising an amino acid sequence that is at least 99% identical to a CD4 EC domain of SEQ ID NO:746. In some embodiments, the first antigen binding domain comprises a first VH comprising the amino acid sequence of SEQ ID NO: 51 and a first VL comprising an amino acid sequence that is at least 95% identical to the amino acid sequence of SEQ ID NO: 56; and the second antigen binding domain comprises one EC domain of CD4 comprising an amino acid sequence that is at least 95% identical to a CD4 EC domain of SEQ ID NO:746. In some embodiments, the first antigen binding domain comprises a first VH comprising the amino acid sequence of SEQ ID NO: 51 and a first VL comprising an amino acid sequence that is at least 95% identical to the amino acid sequence of SEQ ID NO: 56; and the second antigen binding domain comprises one EC domain of CD4 comprising an amino acid sequence that is at least 99% identical to a CD4 EC domain of SEQ ID NO:746. In some embodiments, the first antigen binding domain comprises a first VH comprising the amino acid sequence of SEQ ID NO: 51 and a first VL comprising an amino acid sequence that is at least 99% identical to the amino acid sequence of SEQ ID NO: 56; and the second antigen binding domain comprises one EC domain of CD4 comprising an amino acid sequence that is at least 95% identical to a CD4 EC domain of SEQ ID NO:746. In some embodiments, the first antigen binding domain comprises a first VH comprising the amino acid sequence of SEQ ID NO: 51 and a first VL comprising an amino acid sequence that is at least 99% identical to the amino acid sequence of SEQ ID NO: 56; and the second antigen binding domain comprises one EC domain of CD4 comprising an amino acid sequence that is at least 99% identical to a CD4 EC domain of SEQ ID NO:746. In some embodiments, the first antigen binding domain comprises a first VH comprising an amino acid sequence that is at least 95% identical to the amino acid sequence of SEQ ID NO: 51 and a first VL comprising the amino acid sequence of SEQ ID NO: 56; and the second antigen binding domain comprises one EC domain of CD4 comprising an amino acid sequence that is at least 95% identical to a CD4 EC domain of SEQ ID NO:746. In some embodiments, the first antigen binding domain comprises a first VH comprising an amino acid sequence that is at least 95% identical to the amino acid sequence of SEQ ID NO: 51 and a first VL comprising the amino acid sequence of SEQ ID NO: 56; and the second antigen binding domain comprises one EC domain of CD4 comprising an amino acid sequence that is at least 99% identical to a CD4 EC domain of SEQ ID NO:746. In some embodiments, the first antigen binding domain comprises a first VH comprising an amino acid sequence that is at least 99% identical to the amino acid sequence of SEQ ID NO: 51 and a first VL comprising the amino acid sequence of SEQ ID NO: 56; and the second antigen binding domain comprises one EC domain of CD4 comprising an amino acid sequence that is at least 95% identical to a CD4 EC domain of SEQ ID NO:746. In some embodiments, the first antigen binding domain comprises a first VH comprising an amino acid sequence that is at least 99% identical to the amino acid sequence of SEQ ID NO: 51 and a first VL comprising the amino acid sequence of SEQ ID NO: 56; and the second antigen binding domain comprises one EC domain of CD4 comprising an amino acid sequence that is at least 99% identical to a CD4 EC domain of SEQ ID NO:746. In some embodiments, the first antigen binding domain comprises a first VH and a first VL comprising the amino acid sequences set forth, respectively: SEQ ID NOs: 51 and 56; and the second antigen binding domain comprises one EC domain of CD4 comprising an amino acid sequence of SEQ ID NO:746.

[0275] The term “treatment” or “treating,” to the extent it relates to a disease or condition, includes one or more of preventing the disease or condition from occurring, inhibiting the disease or condition, eliminating the disease or condition, and relieving one or more symptoms of the disease or condition. The terms “treating” and “treatment” as used herein are intended to mean the administration of a compound or composition according to the embodiments disclosed herein to at least one of alleviate or eliminate symptoms of HIV infection and to reduce viral load in a patient. As used herein, the term “effective amount” in the context of the administration of a therapy to a subject refers to the amount of a therapy that achieves a desired prophylactic or therapeutic effect. In various embodiments, the polynucleotide or polynucleotides may be present in a lipid nanoparticle (LNP) or a vector, e.g., a plasmid vector or a viral vector. In some embodiments, the related disease or disorder is caused by infection with HIV. In other embodiments, it is acquired immune deficiency syndrome (AIDS). In certain embodiments, the subject is a virologically suppressed HIV-infected mammal, while in other embodiments, the subject is a treatment-naïve HIV-infected mammal. In certain embodiments, a treatment-naïve subject has a viral load between 10³ and 10⁵ copies/ml, and in certain embodiments, a virologically suppressed subject has a viral load of copies/ml in blood of less than 500, e.g., less than 400, less than 300, less than 200, less than 100, less than 50. In another embodiment, the subject is a mammal, e.g., a human. In certain embodiments, the subject has been diagnosed with an HIV, e.g., HIV-1 or HIV-2, infection or a related disease or disorder, e.g., AIDS, or is considered at risk for developing an HIV, e.g., HIV-1 or HIV-2, infection or a related disease or disorder, e.g., AIDS. Subjects at risk for HIV-related diseases or disorders include patients who have come into contact with an infected person or who have been exposed to HIV in some other way. Administration of a prophylactic agent can occur prior to the manifestation of symptoms characteristic of HIV-related disease or disorder, such that a disease or disorder is prevented or, alternatively, delayed in its progression.

[0276] Also provided are methods for preventing or inhibiting an increase in HIV virus titer, virus replication, virus proliferation or an amount of an HIV viral DNA, HIV proviral DNA, or HIV viral protein in a subject (e.g., a human subject). In one embodiment, the method comprises providing to the subject in need thereof an amount of one or more multi-specific antigen binding molecules described herein, or one or more polynucleotides encoding the one or more multi-specific antigen binding molecules (or their antigen binding fragments), effective to prevent, reduce or inhibit an increase in HIV titer, virus replication, virus proliferation, or an amount of an HIV protein of one or more HIV strains or isolates in the subject. In certain embodiments, the method further comprises measuring an amount of HIV viral or proviral DNA or protein at one or more time points, e.g., before and after the subject in provided with an antibody or antibodies of the present disclosure. Methods and biomarkers for determining an amount of HIV viral or proviral DNA or protein in a subject are known and available in the art, and described for example, in Siliciano, J. D. et al., Curr Opin. HIV AIDS, 5(6): 491-7 (2010), and Rouzioux, C. et al., Curr Opin HIV AIDS, 8(3):170-5 (2013). In various embodiments, the human subject is an adult, a juvenile or an infant. The subject may be symptomatic (e.g., viremic) or asymptomatic (e.g., acutely infected or ART suppressed). In some embodiments, the human subject is acutely infected or recently infected with HIV. In certain embodiments, the subject has not seroconverted. In some embodiments, the human subject is chronically infected with HIV. The subject many or may not be receiving a regimen of antiretroviral therapy (ART).

[0277] Patients can be categorized into Fiebig stages I-VI, which are based on a sequential gain in positive HIV-1 clinical diagnostic assays (viral RNA measured by PCR, p24 and p31 viral antigens measured by enzyme-linked immunosorbent assay (ELISA). p24 antigen is a viral core protein that transiently appears in the blood during the ramp-up phase once HIV-1 RNA levels rise above 10,000 copies/mL and before the development of detectable HIV antibodies. In Fiebig stage I, during ramp-up viremia, only HIV-1 RNA in the blood can be detected. Fiebig stage II commences about 7 days later, when results of tests to detect p24 antigen become positive. In Fiebig stage III, within about 5 days after p24 antigen test results become positive, IgM anti-HIV-1 antibodies can be detected with sufficiently sensitive enzyme immunoassays (EIAs) (e.g., third-generation EIAs). Stage III typically occurs 1-2 weeks after the onset of acute retroviral symptoms. Fiebig stage IV represents the development of an indeterminate Western blot test and occurs about 3 days after EIA tests show positive results. Conversion to a clearly positive Western blot test, Fiebig stage V, generally occurs after another 7 days, or about 1 month after initial infection. Fiebig stages of HIV infection are described, e.g., in Fiebig, et al., AIDS. (2003) 17(13):1871-9; Cohen, et al., J Infect Dis. (2010) 202 Suppl 2:S270-7; and McMichael, et al., Nature Reviews Immunology (2010) 10:11-23, which are hereby incorporated herein by reference in their entireties for all purposes. In some embodiments, the one or more multi-specific antigen binding molecules described herein, or one or more polynucleotides encoding the one or more multi-specific antigen binding molecules (or their antigen binding fragments), is administered to a human subject having an HIV infection of Fiebig stage IV or earlier, e.g., Fiebig stage I, Fiebig stage II, Fiebig stage III or Fiebig stage IV. In some embodiments, the biological sample evaluated is from a human subject having an HIV infection of an HIV infection of Fiebig stage V or Fiebig stage VI.

[0278] In some embodiments, the multi-specific antigen binding molecules comprise a second binding domain, or are co-administered with an antibody or antigen-binding fragment thereof, comprising second VH and VL regions that compete with or comprise VH and VL regions that bind to the third variable loop (V3) (e.g., high mannose patch) comprising a N332 oligomannose glycan and may be used in, for example, methods of inhibiting certain viruses such as HIV isolates described herein, prophylactic inhibiting or preventing infections of certain viruses such as HIV isolates described herein, detection of certain viruses such as HIV isolates described herein in a sample, inhibiting certain viruses such as HIV isolates described herein, or diagnosis of certain viruses such as HIV isolates described herein. Accordingly, in some embodiments, the methods comprise: a) Identifying a human subject who is infected with an HIV expressing a gp120 comprising the following amino acid residues: a glycosylated asparagine at the position corresponding to amino acid residue position 332 (N332glycan), an aspartate at the position corresponding to amino acid residue position 325 (D325), and one or more amino acid residues selected from the group consisting of: a threonine at the position corresponding to amino acid residue position 63 (T63), a leucine at the position corresponding to amino acid residue position 179 (L179), a threonine at the position corresponding to amino acid residue position 320 (T320), and a histidine at the position corresponding to amino acid residue position 330 (H330), wherein the amino acid positions are with reference to SEQ ID NO: 69 (i.e., residues 1-511 of NCBI Ref Seq No. NP_057856.1); and b) Administering to the subject an effective amount of one or more multi-specific antigen binding molecules, a polynucleotide or polynucleotides encoding one or more multi-specific antigen binding molecules, or LNPs or pharmaceutical compositions comprising one or more multi-specific antigen binding molecules or polynucleotide or polynucleotides encoding one or more multi-specific antigen binding molecules, as described above and herein, wherein the second binding domain of at least one multi-specific antigen binding molecule competes with or comprises second VH and VL regions that bind to the third variable loop (V3) (e.g., high mannose patch) comprising a N332 oligomannose glycan. In some embodiments, the method entails identifying a subject infected with an HIV or a population of HIV expressing a gp120 comprising the following amino acid residues: i. N332glycan, D325 and T63; ii. N332glycan, D325 and L179; iii. N332glycan, D325 and T320; iv. N332glycan, D325 and H330; v. N332glycan, D325, T63 and L179; vi. N332glycan, D325, T63 and T320; vii. N332glycan, D325, T63 and H330; viii. N332glycan, D325, L179 and T320; ix. N332glycan, D325, L179 and H330; x. N332glycan, D325, T320 and H330; xi. N332glycan, D325, T63, T320 and H330; xii. N332glycan, D325, T63, L179 and T320; xiii. N332glycan, D325, T63, L179 and H330; xiv. N332glycan, D325, L179, T320 and H330; or xv. N332glycan, D325, T63, L179, T320 and H330, wherein the amino acid positions are with reference to SEQ ID NO: 69. In some embodiments, the method entails identifying a subject infected with an HIV or a population of HIV expressing a gp120 comprising the following amino acid residues: i. N332glycan, D325 and T63; ii. N332glycan, D325 and L179; iii. N332glycan, D325 and T320; or iv. N332glycan, D325 and H330, wherein the amino acid positions are with reference to SEQ ID NO: 69. In some embodiments, the method entails identifying a subject infected with an HIV or a population of HIV expressing a gp120 comprising the following amino acid residues: i. N332glycan, D325, T63 and L179; ii. N332glycan, D325, T63 and T320; iii. N332glycan, D325, T63 and H330; iv. N332glycan, D325, L179 and T320; v. N332glycan, D325, L179 and H330; or vi. N332glycan, D325, T320 and H330, wherein the amino acid positions are with reference to SEQ ID NO: 69. In some embodiments, the method entails identifying a subject infected with an HIV or a population of HIV expressing a gp120 comprising the following amino acid residues: i. N332glycan, D325, L179, T320 and H330; ii. N332glycan, D325, T63, T320 and H330; iii. N332glycan, D325, T63, L179 and T320; or iv. N332glycan, D325, T63, L179 and H330, wherein the amino acid positions are with reference to SEQ ID NO: 69. In some embodiments, the method entails identifying a subject infected with an HIV or a population of HIV expressing a gp120 comprising at least one of the following amino acid residues: i. N332glycan, D325, T63 and H330; ii. N332glycan, D325, T320 and H330; iii. N332glycan, D325, L179, T320 and H330; or iv. N332glycan, D325, T63, L179, T320 and H330, wherein the amino acid positions are with reference to SEQ ID NO: 69. In some embodiments, the subject is infected with an HIV or a population of HIV expressing a gp120 further comprising one or more of the following amino acid residues: a glycan at amino acid residue 301 (glycan301); a lysine at amino acid residue 677 (K677); an amino acid residue other than tryptophan (e.g., A, C, D, E, F, G, H, I, K, L, M, N, P, Q, R, S, T, V or Y) at position 17 (not_W17); an amino acid residue other than arginine (e.g., A, C, D, E, F, G, H, I, K, L, M, N, P, Q, S, T, V, W or Y) at position 747 (not_R747); an insertion_321.01 (e.g., an insertion of any amino acid (e.g., A, C, D, E, F, G, H, I, K, L, M, N, P, Q, R, S, T, V, W or Y) between position G321 and K322); a glutamic acid at position 429 (E429); a glutamine at position 442 (Q442); an arginine at position 335 (R335); an isoleucine at position 165 (I165); a serine at position 393 (S393); an isoleucine at position 307 (I307); a glycan at position 295 (295 glycan); and an asparagine at position 300 (N300), wherein the amino acid positions are with reference to SEQ ID NO: 69. In some embodiments, the second antigen binding domain competes with or comprises second VH and VL regions from an antibody selected from the group consisting of GS-9722 (elipovimab), GS-9721, GS-2872, PGT-121, PGT-121.66, PGT-121.414, PGT-122, PGT-123, PGT-124, PGT-125, PGT-126, PGT-128, PGT-130, PGT-133, PGT-134, PGT-135, PGT-136, PGT-137, PGT-138, PGT-139, 10-1074, 10-1074-J, VRC24, 2G12, BG18, 354BG8, 354BG18, 354BG42, 354BG33, 354BG129, 354BG188, 354BG411, 354BG426, DH270.1, DH270.6, PGDM12, VRC41.01, PGDM21, PCDN-33A, BF520.1 and VRC29.03. In some embodiments, the second antigen binding domain competes with or comprises second VH and VL regions from an antibody selected from the group consisting of GS-9722 (elipovimab), GS-9721, GS-2872, PGT-121.66, PGT-121, PGT-121.414, 10-1074, 10-1074-J and PGT-134. See, co-owned and co-pending Intl. Appl. No. PCT/US2020/033470, entitled “METHODS OF IDENTIFYING HIV PATIENTS SENSITIVE TO THERAPY WITH GP120 V3 GLYCAN-DIRECTED ANTIBODIES,” published as WO 2020/236753, which is hereby incorporated herein by reference in its entirety for all purposes.

[0279] In some embodiments, the multi-specific antigen binding molecules comprise a second binding domain, or are co-administered with an antibody or antigen-binding fragment thereof, comprising second VH and VL regions that compete with or comprise VH and VL regions that bind to the CD4 binding site (CD4bs) and may be used in, for example, methods of inhibiting certain viruses such as HIV isolates described herein, prophylactic inhibiting or preventing infections of certain viruses such as HIV isolates described herein, detection of certain viruses such as HIV isolates described herein in a sample, inhibiting certain viruses such as HIV isolates described herein, or diagnosis of certain viruses such as HIV isolates described herein. Accordingly, in some embodiments, the methods entail (a) Identifying a human subject who is infected with an HIV or a population of HIV expressing a gp120 comprising the following amino acid residues: I201 and one or more of the amino acid residues selected from the group consisting of E102, I108, A281, Y318 and F353, wherein the amino acid positions are with reference to SEQ ID NO: 73; and (b) Administering to the subject an effective amount of an antibody or antigen-binding fragment thereof that competes with or comprises VH and VL regions that bind to an epitope of gp120 comprising the CD4 binding site (CD4bs). In some embodiments, the methods entail identifying a subject infected with an HIV or a population of HIV expressing a gp120 comprising the following amino acid residues: I201 and F353; I201, I108 and F353; I201, I108, A281 and F353; I201, E102, I108, A281 and F353; or I201, E102, I108, A281, Y318 and F353. In some embodiments, the methods entail identifying a subject infected with an HIV or a population of HIV expressing a gp120 comprising the following amino acid residues: I201, I108 and F353; I201, I108, A281 and F353; I201, E102, I108, A281 and F353; or I201, E102, I108, A281, Y318 and F353. In some embodiments, the methods entail identifying a subject infected with an HIV or a population of HIV expressing a gp120 comprising the following amino acid residues: I201, I108, A281 and F353; I201, E102, I108, A281 and F353; or I201, E102, I108, A281, Y318 and F353. In some embodiments, the administered antibody or antigen-binding fragment thereof competes with or comprises VH and VL regions from an antibody selected from the group consisting of 3BNC117, GS-9723, GS-5423, 3BNC60, b12, F105, VRC01, VRC07, VRC07-523, VRC03, VRC06, VRC06b01 VRC08, VRC0801, NIH45-46, PGV04 (a.k.a., VRC-PG04); CH103, 44-VRC13.01, 1NC9, 12A12, N6, 1-18, N49-P7, NC-Cow1, IOMA, CH235 and CH235.12, N49P6, N49P7, N49P11, N49P9 and N60P25. In some embodiments, the administered antibody or antigen-binding fragment thereof competes with or comprises VH and VL regions from an antibody selected from the group consisting of 3BNC117, GS-9723, GS-5423, 3BNC60, VRC01, VRC07 and VRC07-523. See, co-owned and co-pending Provisional Appl. No. 63/112,512, entitled “METHODS OF IDENTIFYING HIV PATIENTS SENSITIVE TO THERAPY WITH gp120 CD4 BINDING SITE-DIRECTED ANTIBODIES,” which is hereby incorporated herein by reference in its entirety for all purposes.

[0280] For in vivo treatment of mammalian subject, e.g., humans, the subject may be administered or provided a pharmaceutical composition comprising one or more multi-specific antigen binding molecules, described herein, and optionally an additional anti-HIV therapeutic agent (e.g., an anti-HIV a broadly neutralizing antibody (bNAb), a TLR agonist). When used for in vivo therapy, an antibody or antibodies described herein are typically administered or provided to the patient in therapeutically effective amounts (i.e., amounts that eliminate or reduce at least one of the patient's viral burden and viral reservoir). In some embodiments, a multi-specific antigen binding molecule is administered at a dose in the range of 0.05 mg to 1000 mg per administration, e.g., from 0.05 mg to 150 mg per administration, e.g., from 0.05 mg to 0.35 mg per administration, e.g., from 25 mg to 50 mg per administration, e.g., from 30 mg to 35 mg per administration, e.g., from 10 mg to 1000 mg per administration, e.g., from 50 mg to 1000 mg per administration, e.g., from 100 mg to 700 mg per administration, e.g., at least 0.05 mg up to 0.1 mg, 0.2 mg, 0.3 mg, 0.35 mg, 0.4 mg, 0.5 mg, 0.6 mg, 0.7 mg, 0.8 mg, 1.0 mg, 5 mg, 10 mg, 25 mg, 30 mg, 35 mg, 40 mg, 45 mg, 50 mg, 60 mg, 70 mg, 80 mg, 90 mg, 100 mg, 200 mg, 300 mg, 400 mg, 500 mg, 600 mg, 700 mg, 800 mg, 900 mg, or 1000 mg per administration. In some embodiments, a multi-specific antigen binding molecule is administered at a dose of from 1 μg/kg to 50 mg/kg body weight per administration, e.g., from 1 μg/kg to 5 μg/kg, e.g., from 350 μg/kg to 550 μg/kg, e.g., from 0.3 mg/kg to 30 mg/kg, e.g., from 2 mg/kg to 10 mg/kg, e.g., from 1 μg/kg up to 2 μg/kg, 3 μg/kg, 4 μg/kg, 5 μg/kg, 10 μg/kg, 50 μg/kg, 100 μg/kg, 250 μg/kg, 300 μg/kg, 350 μg/kg, 400 μg/kg, 410 μg/kg, 420 μg/kg, 430 μg/kg, 440 μg/kg, 450 μg/kg, 460 μg/kg, 470 μg/kg, 480 μg/kg, 490 μg/kg, 500 μg/kg, 750 μg/kg, 1 mg/kg, 1.5 mg/kg, 2 mg/kg, 2.5 mg/kg, 3 mg/kg, 3.5 mg/kg, 4 mg/kg, 4.5 mg/kg, 5 mg/kg, 6 mg/kg, 7 mg/kg, 8 mg/kg, 9 mg/kg, 10 mg/kg, 15 mg/kg, 20 mg/kg, 25 mg/kg, 30 mg/kg, 35 mg/kg, 40 mg/kg, 45 mg/kg, or 50 mg/kg, body weight per administration. In some embodiments, dosing of a multi-specific antigen binding molecule can be reduced or decreased when combining with a second therapeutic agent, e.g., at least one of a second antigen binding molecule and a TLR agonist.

[0281] In particular embodiments, a multi-specific antigen binding molecule, described herein, may be provided to a subject in an amount sufficient to achieve a C_{trough} level of ≤0.1 μg/mL, ≤0.5 μg/ml, ≤1 μg/ml, ≤10 μg/ml, ≤20 μg/ml, ≤25 μg/ml, ≤30 μg/ml, 40 μg/ml, ≤50 μg/ml, ≤75 μg/ml, ≤100 μg/ml, e.g., with a dosing regimen in the range of 2-10 mg/kg at 2 week intervals (Q2W). In certain embodiments, a multi-specific antigen binding molecule, described herein, may be provided to a subject in an amount sufficient to achieve a C_{trough} level in the range of 0.0025 μg/ml to 100 μg/ml, e.g., 0.1 μg/ml to 100 μg/ml, e.g., 0.1 μg/ml to 25 μg/ml. In particular embodiments, a multi-specific antigen binding molecule, described herein, may be provided to a subject in an amount sufficient to achieve a Cₘₐₓ level in the range of 0.25 μg/ml to 1000 μg/ml, e.g., in the range of 50 μg/ml to 250 μg/ml, e.g., >0.25 μg/ml, >0.5 μg/ml, >0.75 μg/ml, >1 μg/ml, >5 μg/ml, >10 μg/ml, >50 μg/ml, >100 μg/ml, >200 μg/ml, >300 μg/ml, >400 μg/ml, >500 μg/ml, or ≥1000 μg/mL. In certain embodiments, a multi-specific antigen binding molecule, described herein, may be provided to a subject in an amount sufficient to achieve a Cₘₐₓ level of 1 μg/ml to 1000 μg/ml, e.g., in the range of 50 μg/ml to 250 μg/ml, e.g., with a dosing regimen in the range of 2-10 mg/kg at 2 week intervals (Q2W). Administration of lower doses and/or repeat dosing at less frequent intervals will result in lower C_{trough} levels and lower Cₘₐₓ levels. Administration of higher doses and/or repeat dosing at more frequent intervals will result in higher C_{trough} levels and higher Cₘₐₓ levels.

[0282] In various embodiments, the multi-specific antigen binding molecule has a serum half-life in a human or cynomolgus monkey of at least 3 days, e.g., at least 4 days, at least 5 days, at least 6 days, at least 7 days, at least 8 days, at least 9 days, at least 10 days, at least 11 days, at least 12 days, at least 13 days, at least 14 days, at least 15 days, at least 16 days, or longer. In various embodiments, the multi-specific antigen binding molecule has a serum half-life in a human or cynomolgus monkey of at least at least 5 days, e.g., at least 5.5 days, at least 6 days, at 6.5 days, at least 7 days, at least 7.5 days, at least 8 days, at least 8.5 days, at least 9 days, at least 10 days, at least 11 days, at least 12 days, at least 13 days, at least 14 days, at least 15 days, at least 16 days, or longer. In some embodiments, the multi-specific antigen binding molecule has a serum half-life in a human or cynomolgus monkey of at least 7 days. In various embodiments, the multi-specific antigen binding molecule has a first antigen binding domain that binds to CD3 with a K_{D} of lower than 10 nM, e.g., lower than 5.0 nM, 4.5 nM, 4.0 nM, 3.5 nM, 3.0 nM, or lower and antigen binding molecule has a serum half-life in a human or cynomolgus monkey of at least at least 5 days, e.g., at least 5.5 days, at least 6 days, at least 6.5 days, at least 7 days, at least 7.5 days, at least 8 days, at least 8.5 days, at least 9 days, at least 10 days, at least 11 days, at least 12 days, at least 13 days, at least 14 days, at least 15 days, at least 16 days, or longer. In some embodiments, the multi-specific antigen binding molecule has a first antigen binding domain that binds to CD3 with a K_{D} of lower than 3.0 nM (e.g., 2.5 nM) and antigen binding molecule has a serum half-life in a human or cynomolgus monkey of at least 7 days.

[0283] In various embodiments, the one or more multi-specific antigen binding molecules described herein are administered one or multiple times. In embodiments employing multiple administration regimens, as appropriate the one or more multi-specific antigen binding molecules described herein can be administered in once daily, once weekly (i.e., QW), once bi-weekly (i.e. once every other week, or once every two weeks or Q2W), once monthly (i.e., QM) or once bi-monthly dosing (i.e. once every other month, or once every two months or Q2M) dosing or administration intervals. In some embodiments, the one or more multi-specific antigen binding molecules are administered once daily, once weekly (i.e., QW), once bi-weekly (i.e. once every other week, or once every two weeks or Q2W), once monthly (i.e., QM), once bi-monthly (i.e. once every other month, or once every two months or Q2M), once every three months (i.e., Q3M), once every four months (i.e., Q4M), once every 5 months (i.e., Q5M), or once every 6 months (i.e., Q6M) dosing. In some embodiments, the one or more multi-specific antigen binding molecules are administered intravenously, subcutaneously or intramuscularly bi-weekly (i.e. once every other week, or once every two weeks or Q2W). In some embodiments, the one or more multi-specific antigen binding molecules are administered intravenously, subcutaneously or intramuscularly monthly (e.g., once every four weeks (Q4W) or once monthly (Q1M)). As appropriate, doses administered in multiple administration regimens can be the same or different between the first and subsequent doses of a first multi-specific antigen binding molecule. As appropriate, doses administered in multiple administration regimens can be the same or different between a first multi-specific antigen binding molecule and a second therapeutic agent (e.g., a second antigen binding molecule or an anti-HIV broadly neutralizing antibody (bNAb)).

[0284] The one or more multi-specific antigen binding molecules described herein are administered or provided to a mammalian subject, e.g., a human, in accord with known methods, such as, but not limited to, intravenous administration, e.g., as a bolus or by continuous infusion over a period of time, by intramuscular, subcutaneous, intraperitoneal, intracerebrospinal, intraarticular, intrasynovial, intrathecal, oral, topical, or inhalation routes. As appropriate, the multi-specific antigen binding molecules may be administered parenterally, when possible, at the target cell site, or intravenously. In one embodiment, administration of the one or more multi-specific antigen binding molecules to the subject is via an intravenous route. In another embodiment, administration of the one or more multi-specific antigen binding molecules to the subject is via a subcutaneous route. In another embodiment, administration of the one or more multi-specific antigen binding molecules to the subject is via an intramuscular route. In various embodiments, polynucleotides encoding the multi-specific antigen binding molecules can be electroporated, e.g., for transdermal delivery. In some embodiments, pharmaceutical compositions of the disclosure are administered to a subject systemically, parenterally, or locally.

[0285] Further provided are methods for treating an HIV infection, comprising administering to a human subject in need thereof a therapeutically effective amount of one or more multi-specific antigen binding molecules, as disclosed herein. In some embodiments, the present disclosure provides a method for preventing an HIV infection, comprising administering to a human subject in need thereof a therapeutically effective amount of one or more multi-specific antigen binding molecules, as disclosed herein.

[0286] In one embodiment, a method for treating an HIV infection in a human subject having or at risk of having the infection is provided, the method comprising administering to the human subject a therapeutically effective amount of one or more multi-specific antigen binding molecules disclosed herein, optionally in combination with a therapeutically effective amount of one or more (e.g., one, two, three, one or two, or one to three) additional therapeutic agents. In some embodiments, after one or more administrations of the one or more multi-specific antigen binding molecules described herein, optionally with one or more additional therapeutic agents, the subject does not exhibit symptoms of HIV or AIDS in the absence of anti-retroviral treatment (ART) for at least 6 months, at least 1 year, at least 2 years, at least 3 years, or more. In some embodiments, after one or more administrations of the one or more multi-specific antigen binding molecules, optionally with one or more additional therapeutic agents, the subject has a viral load of copies/ml blood of less than 500, e.g., less than 400, less than 300, less than 200, less than 100, less than 50, in the absence of anti-retroviral treatment (ART) for at least 6 months, at least 1 year, at least 2 years, at least 3 years, or more.

### 10. Combination Therapies

[0287] In certain embodiments, this disclosure provides a method for treating or preventing an HIV infection in a human subject having, or at risk of having, the HIV infection. The method comprises administering to the human subject a therapeutically effective amount of one or more multi-specific antigen binding molecules, as disclosed herein, or a pharmaceutical composition thereof, in combination with a therapeutically effective amount of one or more (e.g., one, two, three, one or two, or one to three) additional therapeutic agents. In one embodiment, a method for treating an HIV infection in a human subject having or at risk of having the infection is provided, the method comprising administering to the human subject a therapeutically effective amount of one or more multi-specific antigen binding molecule, or a pharmaceutically acceptable salt thereof, in combination with a therapeutically effective amount of one or more (e.g., one, two, three, one or two, or one to three) additional therapeutic agents.

[0288] In one embodiment, pharmaceutical compositions comprising one or more of the multi-specific antigen binding molecules disclosed herein, or a pharmaceutical composition thereof, in combination with one or more (e.g., one, two, three, one or two, or one to three) additional therapeutic agents, and a pharmaceutically acceptable carrier, diluent, or excipient are provided.

[0289] In certain embodiments, provided are methods for treating an HIV infection, comprising administering to a patient in need thereof a therapeutically effective amount of one or more of the multi-specific antigen binding molecules described herein, or a pharmaceutical composition thereof, in combination with a therapeutically effective amount of one or more additional therapeutic agents which are suitable for treating an HIV infection.

[0290] In certain embodiments, one or more of the multi-specific antigen binding molecules described herein, or a pharmaceutical composition thereof, are combined or co-administered with one, two, three, four, or more additional therapeutic agents. In certain embodiments, one or more of the multi-specific antigen binding molecules described herein, or a pharmaceutical composition thereof, are combined or co-administered with two additional therapeutic agents. In other embodiments, one or more of the multi-specific antigen binding molecules described herein, or a pharmaceutical composition thereof, are combined or co-administered with three additional therapeutic agents. In further embodiments, one or more of the multi-specific antigen binding molecules described herein, or a pharmaceutical composition thereof, is combined or co-administered with four additional therapeutic agents. The one, two, three, four, or more additional therapeutic agents can be different therapeutic agents selected from the same class of therapeutic agents (e.g., one or more anti-HIV broadly neutralizing antibodies), and/or they can be selected from different classes of therapeutic agents (e.g., one or more anti-HIV broadly neutralizing antibodies and one or more TLR agonists).

### Administration of HIV Combination Therapies

[0291] In certain embodiments, one or more of the multi-specific antigen binding molecules described herein are co-administered with one or more additional therapeutic agents. Co-administration of one or more multi-specific antigen binding molecules disclosed herein with one or more additional therapeutic agents generally refers to simultaneous or sequential administration of one or more multi-specific antigen binding molecules disclosed herein and one or more additional therapeutic agents, such that therapeutically effective amounts of the one or more multi-specific antigen binding molecules disclosed herein and the one or more additional therapeutic agents are both present in the body of the patient. When administered sequentially, the combination may be administered in two or more administrations.

[0292] Co-administration includes concurrent administration as well as sequential administration of unit dosages of the one or more of the multi-specific antigen binding molecules described herein before or after administration of unit dosages of one or more additional therapeutic agents. For example, one or more of the multi-specific antigen binding molecules described herein may be administered within seconds, minutes, hours or days of the administration of the one or more additional therapeutic agents. In some embodiments, a unit dose of one or more multi-specific antigen binding molecules disclosed herein is administered first, followed within seconds, minutes, hours or days by administration of a unit dose of one or more additional therapeutic agents. Alternatively, a unit dose of one or more additional therapeutic agents is administered first, followed by administration of a unit dose of one or more multi-specific antigen binding molecules disclosed herein within seconds, minutes, hours or days. In other embodiments, a unit dose of one or more multi-specific antigen binding molecules disclosed herein is administered first, followed, after a period of hours (e.g., 1-12 hours, 1-24 hours, 1-36 hours, 1-48 hours, 1-60 hours, 1-72 hours), by administration of a unit dose of one or more additional therapeutic agents. In yet other embodiments, a unit dose of one or more additional therapeutic agents is administered first, followed, after a period of hours (e.g., 1-12 hours, 1-24 hours, 1-36 hours, 1-48 hours, 1-60 hours, 1-72 hours), by administration of a unit dose of one or more multi-specific antigen binding molecules disclosed herein.

[0293] In certain embodiments, one or more multi-specific antigen binding molecules disclosed herein is combined or co-administered with one or more additional therapeutic agents in a unitary dosage form for simultaneous administration to a patient, for example as a liquid or suspension dosage form, e.g., for intravenous, intramuscular or subcutaneous administration.

[0294] In certain embodiments, the one or more multi-specific antigen binding molecules are formulated as a liquid solution or suspension which may optionally contain one or more other additional therapeutic agents useful for treating HIV. In certain embodiments, the liquid solution or suspension can contain another active ingredient for treating HIV, as another anti-HIV antibody or antigen-binding fragment thereof, a HIV protease inhibitor, a HIV non-nucleoside or non-nucleotide inhibitor of reverse transcriptase, a HIV nucleoside or nucleotide inhibitor of reverse transcriptase, a HIV integrase inhibitor, a HIV non-catalytic site (or allosteric) integrase inhibitor, pharmacokinetic enhancer, and combinations thereof.

[0295] In certain embodiments, the one or more multi-specific antigen binding molecules can be administered in multiple administration regimens, i.e., are administered two or more times at first and subsequent time points. In certain embodiments, such liquid solutions or suspensions are suitable for once daily, once weekly (i.e., QW), once bi-weekly (i.e. once every other week, or once every two weeks or Q2W), once monthly (i.e., QM) or once bi-monthly dosing (i.e. once every other month, or once every two months or Q2M) dosing or administration intervals. In some embodiments, the one or more multi-specific antigen binding molecules are administered once daily, once weekly (i.e., QW), once bi-weekly (i.e. once every other week, or once every two weeks or Q2W), once monthly (i.e., QM), once bi-monthly (i.e. once every other month, or once every two months or Q2M), once every three months (i.e., Q3M), once every four months (i.e., Q4M), once every 5 months (i.e., Q5M), or once every 6 months (i.e., Q6M) dosing. In some embodiments, the one or more multi-specific antigen binding molecules are administered intravenously, subcutaneously or intramuscularly bi-weekly (i.e. once every other week, or once every two weeks or Q2W). In some embodiments, the one or more multi-specific antigen binding molecules are administered intravenously, subcutaneously or intramuscularly monthly (e.g., once every four weeks (Q4W) or once monthly (Q1M)).

a. Combination Therapies with One or More Additional Broadly Neutralizing Antibodies

[0296] In certain embodiments, a multi-specific antigen binding molecule disclosed herein is combined or co-administered with one or more additional anti-HIV broadly neutralizing antibodies (bNAbs), or fragments thereof. The one or more additional bNAbs can be in any format (e.g., monospecific, multi-specific, IgG, scFv). Generally, the one or more additional bNAbs bind to a different antigen, or region or epitope of HIV that does not compete with the first multi-specific antigen binding molecule. Multiple clinical studies have now shown that treatment of HIV infected individuals with single broadly neutralizing antibodies (bNAbs) leads to temporary suppression of sensitive viruses, followed by rapid outgrowth of resistant viruses—many of which appear to be rare pre-existing viral variants.

[0297] Scheid, et al. reported that VRC01 (a V3-glycan binding bNAb) and 3BNC117 (a CD4 binding site binding bNAb) neutralized 96% of 118 cross-clade viruses tested in-vitro (Scheid et al., Science, 333: 1633-1637 (2011)). Further, clinical trials showed that many HIV infected patients receiving the antibody treatment exhibited rare and pre-existing resistant clones, even when their plasma HIV isolates appeared to be sensitive to the antibody (Caskey et al., Nature, 522: 487-491 (2016); Scheid et al., Nature, 535:556-560 (2016)). These results suggested that 3BNC117 may be broad when tested against HIV isolates collected from different patients (inter-patient bread), yet it may not neutralize 100% of viral isolates within individual patients (intra-patient breadth).

[0298] An antibody known as 10-1074, part of the PGT121 lineage and taken from the same donor and with similar neutralizing breadth, has also been tested in clinical trials (Mouquet et al., PNAS, 109:E3268-3277 (2012); Caskey et al., Nature Medicine, 23:185-191 (2017)). 10-1074 was originally shown to neutralize approximately 66% of 60 viruses tested at an IC50 below 50 μg/mL (Mouquet et al., PNAS (supra)). The 10-1074 trials showed that in many patients received 10-1074 therapy, there were resistant clones, even when the plasma HIV isolates appeared to be sensitive to the antibody (Caskey et al. Nature Medicine (supra)). This data suggests that most patients may harbor rare pre-existing viral variants that are resistant to 10-1074. These 10-1074 resistance variants showed correlated cross-resistance to PGT121, consistent with close evolutionary relationship between 10-1074 and PGT121. However, nearly all of the resistant viruses isolated during the 10-1074 clinical trial were sensitive to neutralization by 3BNC117 (Caskey et al. Nature Medicine (supra)). This data is consistent with the conclusion that combination antibody therapy, using complementary bNAbs that bind to different regions of gp120, allows for more complete intra-patient viral coverage.

[0299] In certain embodiments, the bNAb combinations can achieve complete intra-patient viral coverage. In some embodiments, the combination therapy includes first and second antigen binding molecules, wherein the first and second antigen binding molecules bind to different first and second epitopes or regions of gp120, or gp120 and gp41. In some embodiments, the combination therapy includes a multi-specific antigen binding molecule and an anti-HIV broadly neutralizing antibody (bNAb), wherein the multi-specific antigen binding molecule and the bNAb bind to different first and second epitopes or regions of gp120, or gp120 and gp41. In some embodiments, the different first and second epitopes or regions of gp120 are selected from the group consisting of: (i) third variable loop (V3) (e.g., high mannose patch) comprising a N332 oligomannose glycan; (ii) second variable loop (V2) (e.g., Env trimer apex); (iii) CD4 binding site (CD4bs); (iv) gp120/gp41 interface; or (v) silent face of gp120. In some embodiments, the combination therapy includes a first multi-specific antigen binding molecule, described herein, and another anti-HIV broadly neutralizing antibody or bNAb (i.e., a neutralizing antibody that neutralizes multiple HIV-1 viral strains). Various bNAbs are known in the art and may be used as one or both of a combining therapeutic agent and in the anti-HIV antigen targeting arm or second antigen binding domain of the herein described multi-specific antigen binding molecules, identified herein. Additional illustrative bNAbs of use include, without limitation, those described in U.S. Pat. Nos. 8,673,307; 9,493,549; 9,783,594; and WO 2012/154312; WO2012/158948; WO2013/086533; WO2013/142324; WO2014/063059; WO 2014/089152, WO 2015/048462; WO 2015/103549; WO2015/117008; WO2016/014484; WO 2016/154003; WO 2016/196975; WO2016/149710; WO2017/096221; WO 2017/133639; WO 2017/133640, WO 2018/125813, including antibodies 12A12, 12A21, NIH45-46, bANC131, 8ANC134, 1B2530, INC9, 8ANC195, 8ANC196, 10-259, 10-303, 10-410, 10-847, 10-996, 10-1074, 10-1121, 10-1130, 10-1146, 10-1341, 10-1369, 10-1074GM and BG18. Additional examples include those described in Sajadi, et al., Cell. (2018) 173(7):1783-1795; Sajadi, et al., J Infect Dis. (2016) 213(1):156-64; Klein et al., Nature, 492(7427): 118-22 (2012), Horwitz et al., Proc Natl Acad Sci USA, 110(41): 16538-43 (2013), Scheid, et al., Science, 333: 1633-1637 (2011), Scheid, et al., Nature, 458:636-640 (2009), Eroshkin et al, Nucleic Acids Res., 42 (Database issue):D1 133-9 (2014), Mascola et al., Immunol Rev., 254(1):225-44 (2013), such as 2F5, 4E10, M66.6, CAP206-CH12, 10E8, 10E8v4, 10E8-5R-100cF, DH511.11P, 7b2, and LN01 (all of which bind the MPER of gp41); PG9, PG16, CH01-04 (all of which bind V1V2-glycan), 2G12 (which binds to outer domain glycan); b12, F105, VRC01, VRC07, VRC07-523, VRC03, VRC06, VRC06b01 VRC08, VRC0801, NIH45-46, 3BNC117, 3BNC60, PGV04 (a.k.a., VRC-PG04); CH103, 44-VRC13.01, 1NC9, 12A12, N6, 1-18, N49-P7, NC-Cow1, IOMA, CH235 and CH235.12, N49P6, N49P7, N49P11, N49P9 and N60P25 (all of which bind to the CD4 binding site).

[0300] In some embodiments, the combination therapy includes a multi-specific antigen binding molecule or an antibody that binds to an epitope or region of gp120 in the third variable loop (V3) (e.g., high mannose patch) comprising a N332 oligomannose glycan and competes with or comprises one or more of CDRs and VH and VL regions from an antibody selected from the group consisting of GS-9722 (elipovimab), GS-2872, PGT-121, PGT-121.66, PGT-121.414, PGT-122, PGT-123, PGT-124, PGT-125, PGT-126, PGT-128, PGT-130, PGT-133, PGT-134, PGT-135, PGT-136, PGT-137, PGT-138, PGT-139, 10-1074, 10-1074-J, VRC24, 2G12, BG18, 354BG8, 354BG18, 354BG42, 354BG33, 354BG129, 354BG188, 354BG411, 354BG426, DH270.1, DH270.6, PGDM12, VRC41.01, PGDM21, PCDN-33A, BF520.1 and VRC29.03. In some embodiments, the combination therapy includes a multi-specific antigen binding molecule or an antibody that binds to an epitope or region of gp120 in the CD4 binding site (CD4bs) and competes with or comprises one or more of CDRs and VH and VL regions from an antibody selected from the group consisting of b12, F105, VRC01, VRC07, VRC07-523, VRC03, VRC06, VRC06b01 VRC08, VRC0801, NIH45-46, 3BNC117, 3BNC60, PGV04 (a.k.a., VRC-PG04); CH103, 44-VRC13.01, 1NC9, 12A12, N6, 1-18, N49-P7, NC-Cow1, IOMA, CH235 and CH235.12, N49P6, N49P7, N49P11, N49P9 and N60P25. In some embodiments, the combination therapy comprises co-administering (i) a multi-specific antigen binding molecule targeting CD3 and comprising a soluble extracellular region of CD4 (e.g., domain 1 (D1), D1-D2, D1-D3, D1-D4), as described herein; (ii) an antibody that competes with or comprises VH and VL regions from an antibody selected from the group consisting of 10-1074, 10-1074-J, GS-9722 (elipovimab), GS-2872, PGT-121, PGT-121.66, PGT-121.414 and PGT-134; and; (iii) an antibody that competes with or comprises VH and VL regions from an antibody selected from the group consisting of GS-9723, GS-5423, 3BNC117, VRC07 and VRC07-523.

[0301] In some embodiments, the combination therapy includes a multi-specific antigen binding molecule or an antibody that binds to an epitope or region of gp120 in the second variable loop (V2) (e.g., Env trimer apex) and competes with or comprises one or more of CDRs and VH and VL regions from an antibody selected from the group consisting of PG9, PG16, PGC14, PGG14, PGT-142, PGT-143, PGT-144, PGT-145, CH01, CH59, PGDM1400, CAP256, CAP256-VRC26.08, CAP256-VRC26.09, CAP256-VRC26.25, PCT64-24E and VRC38.01. In some embodiments, the combination therapy includes a multi-specific antigen binding molecule or an antibody that binds to an epitope or region of gp120 in the gp120/gp41 interface and competes with or comprises second VH and VL regions from an antibody selected from the group consisting of PGT-151, CAP248-2B, 35022, 8ANC195, ACS202, VRC34 and VRC34.01. In some embodiments, the combination therapy includes a multi-specific antigen binding molecule or an antibody that binds to an epitope or region of the gp120 silent face and competes with or comprises second VH and VL regions from an antibody selected from VRC-PG05 and SF12. In some embodiments, the combination therapy includes a multi-specific antigen binding molecule or an antibody that binds to an epitope or region of gp41 in the membrane proximal region (MPER) and competes with or comprises second VH and VL regions from an antibody selected from the group consisting of 10E8, 10E8v4, 10E8-5R-100cF, 4E10, DH511.11P, 2F5, 7b2, and LN01. In some embodiments, the combination therapy includes a multi-specific antigen binding molecule or an antibody that binds to and epitope or region of the gp41 fusion peptide and competes with or comprises second VH and VL regions from an antibody selected from the group consisting of VRC34 and ACS202.

[0302] In certain embodiments, the multi-specific antigen binding molecules and/or bNAbs may be improved to have enhanced drug-like-properties, reduced immunogenicity, enhanced ADCC, and suitable pharmacokinetic properties. Such antibodies were shown to bind to the HIV envelope glycoprotein expressed on the surface of virion or infected cells, and mediating both direct neutralization of the virus as well as potent NK, Monocyte and PBMC killing of these cells. This property allows the antibodies to treat HIV infections by neutralizing the virus, and also kill and eliminate latently HIV infected cells in infected individuals, potentially leading to a sterilizing cure for HIV.

b. Combination Therapies with One or More Additional Anti-HIV Therapeutic Agents

### HIV Combination Therapy

[0303] In some embodiments, the additional therapeutic agent is a latency reversing agent (LRA). Example LRAs include IL-15 receptor agonists (e.g., ALT-803; interleukin-15/Fc fusion protein (e.g., XmAb24306)); recombinant interleukin-15 (e.g., AM0015, NIZ-985); pegylated IL-15 (e.g., NKTR-255)) and agonists of a toll-like receptor (TLR), e.g., an agonist of one or more of TLR1 (NCBI Gene ID: 7096), TLR2 (NCBI Gene ID: 7097), TLR3 (NCBI Gene ID: 7098), TLR4 (NCBI Gene ID: 7099), TLR5 (NCBI Gene ID: 7100), TLR6 (NCBI Gene ID: 10333), TLR7 (NCBI Gene ID: 51284), TLR8 (NCBI Gene ID: 51311), TLR9 (NCBI Gene ID: 54106), and TLR10 (NCBI Gene ID: 81793). In some embodiments, the LRA is a TLR7 agonist. In other embodiments, the additional therapeutic agent is a latency reversing agent (LRA), e.g., a TLR8 agonist. Examples of TLR agonists include but are not limited to vesatolimod. Additional examples include but are not limited to the compounds described in U.S. Pat. No. 8,367,670 and the compounds described in U.S. Patent Application Publication No. 2016/0289229. In one embodiment, the antibody described herein may be combined with TLR7 agonist such as vesatolimod. In another embodiment, the antibody described herein may be combined with TLR8 agonist, e.g., selgantolimod (GS-9688). In one embodiment, the additional therapeutic agent is a TLR modulator. TLR modulators may include modulators of TLR1, TLR2, TLR3, TLR4, TLR5, TLR6, TLR7, TLR8, TLR9, TLR10, TLR11, TLR12, and TLR13. Examples of TLR3 modulators include rintatolimod, poly-ICLC, RIBOXXON®, Apoxxim, RIBOXXIM®, IPH-33, MCT-465, MCT-475, and ND-1.1. Examples of TLR7 modulators include GS-9620, GSK-2245035, imiquimod, resiquimod, DSR-6434, DSP-3025, IMO-4200, MCT-465, MEDI-9197, 3M-051, SB-9922, 3M-052, Limtop, TMX-30X, TMX-202, RG-7863, RG-7795, and the compounds disclosed in US20100143301 (Gilead Sciences), US20110098248 (Gilead Sciences), and US20090047249 (Gilead Sciences). Examples of TLR8 modulators include selgantolimod (GS-9688), motolimod, resiquimod, 3M-051, 3M-052, MCT-465, IMO-4200, VTX-763, VTX-1463, and the compounds disclosed in US20140045849 (Janssen), US20140073642 (Janssen), WO2014/056953 (Janssen), WO2014/076221 (Janssen), WO2014/128189 (Janssen), US20140350031 (Janssen), WO2014/023813 (Janssen), US20080234251 (Array Biopharma), US20080306050 (Array Biopharma), US20100029585 (Ventirx Pharma), US20110092485 (Ventirx Pharma), US20110118235 (Ventirx Pharma), US20120082658 (Ventirx Pharma), US20120219615 (Ventirx Pharma), US20140066432 (Ventirx Pharma), US20140088085 (Ventirx Pharma), US20140275167 (Novira Therapeutics), and US20130251673 (Novira Therapeutics). Examples of TLR9 modulators (e.g., agonists) include BB-001, BB-006, CYT-003, IMO-2055, IMO-2125, IMO-3100, IMO-8400, IR-103, IMO-9200, AST-008 (cavrotolimod), cobitolimod, CMP-001, agatolimod, DIMS-9054, DV-1079, DV-1179, AZD-1419, leftolimod (MGN-1703), litenimod, CYT-003-QbG10, tilsotolimod and PUL-042.

[0304] In some embodiments, the additional therapeutic agent is an agonist of DExD/H-box helicase 58 (DDX58; a.k.a., RIG-I, RIG1, RIGI, RLR-1, SGMRT2; NCBI Gene ID: 23586). An illustrative RIG-I agonist is KIN1148, described by Hemann, et al., J Immunol May 1, 2016, 196 (1 Supplement) 76.1. Additional RIG-I agonists are described, e.g., in Elion, et al., Cancer Res. (2018) 78(21):6183-6195; and Liu, et al., J Virol. (2016) 90(20):9406-19. RIG-I agonists are commercially available, e.g., from Invivogen (invivogen.com).

[0305] In certain embodiments, such formulations are suitable for once daily, once weekly, once bi-weekly, once monthly, once every two months, or once every three months dosing.

[0306] In some embodiments, the additional therapeutic agent may be an anti-HIV agent. In some instances, the additional therapeutic agent can be HIV protease inhibitors, HIV non-nucleoside or non-nucleotide inhibitors of reverse transcriptase, HIV nucleoside or nucleotide inhibitors of reverse transcriptase, HIV integrase inhibitors, HIV non-catalytic site (or allosteric) integrase inhibitors, HIV entry inhibitors, HIV maturation inhibitors, HIV capsid inhibitors, nucleocapsid protein 7 (NCp7) inhibitors, HIV Tat or Rev inhibitors, inhibitors of Tat-TAR-P-TEFb, immunomodulators (e.g., immunostimulators), immunotherapeutic agents, antibody-drug conjugates, gene modifiers, gene editors (such as CRISPR/Cas9, zinc finger nucleases, homing nucleases, synthetic nucleases, TALENs), cell therapies (such as chimeric antigen receptor T-cell, CAR-T, and engineered T-cell receptors, TCR-T, autologous T-cell therapies, engineered B cells, NK cells), latency reversing agents, compounds that target the HIV capsid, immune-based therapies, phosphatidylinositol 3-kinase (PI3K) inhibitors, HIV antibodies, bispecific antibodies and “antibody-like” therapeutic proteins, HIV p17 matrix protein inhibitors, IL-13 antagonists, peptidyl-prolyl cis-trans isomerase A modulators, protein disulfide isomerase inhibitors, complement C5a receptor antagonists, DNA methyltransferase inhibitor, Fatty acid synthase inhibitor, HIV vif gene modulators, Vif dimerization antagonists, HIV-1 viral infectivity factor inhibitors, HIV-1 Nef modulators, TNF alpha ligand inhibitors, HIV Nef inhibitors, Hck tyrosine kinase modulators, mixed lineage kinase-3 (MLK-3) inhibitors, HIV-1 splicing inhibitors, integrin antagonists, nucleoprotein inhibitors, splicing factor modulators, COMM domain containing protein 1 modulators, HIV ribonuclease H inhibitors, IFN antagonists, retrocyclin modulators, CD3 antagonists, CDK-4 inhibitors, CDK-6 inhibitors, CDK-9 inhibitors, Cytochrome P450 3 inhibitors, CXCR4 modulators, dendritic ICAM-3 grabbing nonintegrin 1 inhibitors, HIV GAG protein inhibitors, HIV POL protein inhibitors, Complement Factor H modulators, ubiquitin ligase inhibitors, deoxycytidine kinase inhibitors, cyclin dependent kinase inhibitors, HPK1 (MAP4K1) inhibitors, proprotein convertase PC9 stimulators, ATP dependent RNA helicase DDX3X inhibitors, reverse transcriptase priming complex inhibitors, G6PD and NADH-oxidase inhibitors, mTOR complex 1 inhibitors, mTOR complex 2 inhibitors, P-Glycoprotein modulators, RNA polymerase modulators, TAT protein inhibitors, Prolylendopeptidase inhibitors, Phospholipase A2 inhibitors, pharmacokinetic enhancers, HIV gene therapy, HIV vaccines, anti-HIV peptides, and combinations thereof.

[0307] In some embodiments, the additional therapeutic agent is selected from the group consisting of combination drugs for HIV, other drugs for treating HIV, HIV protease inhibitors, HIV reverse transcriptase inhibitors, HIV integrase inhibitors, HIV non-catalytic site (or allosteric) integrase inhibitors, HIV entry (fusion) inhibitors, HIV maturation inhibitors, latency reversing agents, capsid inhibitors, immune-based therapies, PI3K inhibitors, HIV antibodies, and bispecific antibodies, and “antibody-like” therapeutic proteins, and combinations thereof.

[0308] In some embodiments, the additional therapeutic agent or agents are selected from HIV protease inhibitors, HIV non-nucleoside or non-nucleotide inhibitors of reverse transcriptase, HIV nucleoside or nucleotide inhibitors of reverse transcriptase, HIV integrase inhibitors, HIV capsid inhibitors, gp41 inhibitors, CXCR4 inhibitors, gp120 inhibitors, CCR5 inhibitors, Nef inhibitors, latency reversing agents, HIV bNAbs, agonists of TLR7, TLR8, and TLR9, HIV vaccines, cytokines, immune checkpoint inhibitors, FLT3 ligands, T cell and NK cell recruiting bispecific antibodies, chimeric T cell receptors targeting HIV antigens, pharmacokinetic enhancers, and other drugs for treating HIV, and combinations thereof.

[0309] In some embodiments, the additional therapeutic agent or agents are selected from dolutegravir, cabotegravir, islatravir, darunavir, bictegravir, elsulfavirine, rilpivirine, and lenacapavir, and combinations thereof.

[0310] In some embodiments, the additional therapeutic agent or agents are selected from dolutegravir, cabotegravir, islatravir, darunavir, bictegravir, elsulfavirine, rilpivirine, and lenacapavir.

### HIV Long Acting Therapies

[0311] In some embodiments, the one or more multi-specific antigen binding molecules described herein are combined or co-administered with an HIV long-acting anti-HIV regimen. Examples of as long acting regimens that can be combined or co-administered include without limitation cabotegravir, rilpivirine, any integrase LA, VM-1500 LAI, maraviroc (LAI), tenofovir implant, islatravir implant, doravirine, raltegravir, and long acting dolutegravir.

### HIV Combination Drugs

[0312] In certain embodiments, the one or more multi-specific antigen binding molecules described herein are combined or co-administered with an HIV combination drug. Examples of combination drugs that can be employed with the one or more multi-specific antigen binding molecules described herein include ATRIPLA® (efavirenz, tenofovir disoproxil fumarate, and emtricitabine); COMPLERA® (EVIPLERA®; rilpivirine, tenofovir disoproxil fumarate, and emtricitabine); STRIBILD® (elvitegravir, cobicistat, tenofovir disoproxil fumarate, and emtricitabine); TRUVADA® (tenofovir disoproxil fumarate and emtricitabine; TDF+FTC); DESCOVY® (tenofovir alafenamide and emtricitabine); ODEFSEY® (tenofovir alafenamide, emtricitabine, and rilpivirine); GENVOYA® (tenofovir alafenamide, emtricitabine, cobicistat, and elvitegravir); darunavir, tenofovir alafenamide hemifumarate, emtricitabine, and cobicistat; efavirenz, lamivudine, and tenofovir disoproxil fumarate; lamivudine and tenofovir disoproxil fumarate; tenofovir and lamivudine; tenofovir alafenamide and emtricitabine; tenofovir alafenamide hemifumarate and emtricitabine; tenofovir alafenamide hemifumarate, emtricitabine, and rilpivirine; tenofovir alafenamide hemifumarate, emtricitabine, cobicistat, and elvitegravir; tenofovir analog; COMBIVIR® (zidovudine and lamivudine; AZT+3TC); EPZICOM® (LIVEXA®; abacavir sulfate and lamivudine; ABC+3TC); KALETRA® (ALUVIA®; lopinavir and ritonavir); TRIUMEQ® (dolutegravir, abacavir, and lamivudine); BIKTARVY® (bictegravir+emtricitabine+tenofovir alafenamide), DOVATO® (dolutegravir+lamivudine), TRIZIVIR® (abacavir sulfate, zidovudine, and lamivudine; ABC+AZT+3TC); atazanavir and cobicistat; atazanavir sulfate and cobicistat; atazanavir sulfate and ritonavir; darunavir and cobicistat; dolutegravir and rilpivirine; dolutegravir and rilpivirine hydrochloride; dolutegravir, abacavir sulfate, and lamivudine; lamivudine, nevirapine, and zidovudine; raltegravir and lamivudine; doravirine, lamivudine, and tenofovir disoproxil fumarate; doravirine, lamivudine, and tenofovir disoproxil; dolutegravir+lamivudine, lamivudine+abacavir+zidovudine, lamivudine+abacavir, lamivudine+tenofovir disoproxil fumarate, lamivudine+zidovudine+nevirapine, lopinavir+ritonavir, lopinavir+ritonavir+abacavir+lamivudine, lopinavir+ritonavir+zidovudine+lamivudine, tenofovir+lamivudine, and tenofovir disoproxil fumarate+emtricitabine+rilpivirine hydrochloride, lopinavir, ritonavir, zidovudine, lopinavir+ritonavir+abacavir+lamivudine, and lamivudine; cabotegravir+rilpivirine; 3BNC117+albuvirtide, elpida (elsulfavirine; VM-1500), VM-1500A, lenacapavir+islatravir (oral, injectable), and dual-target HIV-1 reverse transcriptase/nucleocapsid protein 7 inhibitors.

### Other HIV Drugs

[0313] Examples of other drugs for treating HIV that can be combined with the one or more multi-specific antigen binding molecules described herein include aspernigrin C, acemannan, alisporivir, BanLec, deferiprone, Gamimune, metenkefalin, naltrexone, Prolastin, REP 9, RPI-MN, VSSP, H1viral, SB-728-T, 1,5-dicaffeoylquinic acid, rHIV7-shl-TAR-CCR5RZ, AAV-eCD4-Ig gene therapy, MazF gene therapy, BlockAide, bevirimat derivatives, ABX-464, AG-1105, APH-0812, bryostatin analogs, BIT-225, BRII-732, BRII-778, CYT-107, CS-TATI-1, fluoro-beta-D-arabinose nucleic acid (FANA)-modified antisense oligonucleotides, FX-101, GILENYA® (fingolimod), griffithsin, HGTV-43, HPH-116, HS-10234, hydroxychloroquine, IMB-10035, IMO-3100, IND-02, JL-18008, LADAVRU, MK-1376, MK-2048, MK-4250, MK-8507, MK-8558, islatravir (MK-8591) (islatravir), NOV-205, OB-002H, ODE-Bn-TFV, PA-1050040 (PA-040), PC-707, PGN-007, QF-036, S-648414, SCY-635, SB-9200, SCB-719, TR-452, TEV-90110, TEV-90112, TEV-90111, TEV-90113, RN-18, DIACC-1010, Fasnall, Immuglo, 2-CLIPS peptide, HRF-4467, thrombospondin analogs, TBL-1004HI, VG-1177, x1-081, AVI-CO-004, rfhSP-D, [18F]-MC-225, URMC-099-C, RES-529, Verdinexor, IMC-M113V, IML-106, antiviral fc conjugate (AVC), VIR-576, nipamovir, Covimro, and ABBV-1882.

### HIV Protease Inhibitors

[0314] In certain embodiments, the one or more multi-specific antigen binding molecules described herein are combined or co-administered with an HIV protease inhibitor. Examples of HIV protease inhibitors that can be combined with the one or more multi-specific antigen binding molecules, described herein, include amprenavir, atazanavir, brecanavir, darunavir, fosamprenavir, fosamprenavir calcium, indinavir, indinavir sulfate, lopinavir, nelfinavir, nelfinavir mesylate, ritonavir, saquinavir, saquinavir mesylate, tipranavir, ASC-09+ritonavir, AEBL-2, DG-17, GS-1156, TMB-657 (PPL-100), T-169, BL-008, MK-8122, TMB-607, GRL-02031, and TMC-310911. Additional examples of protease inhibitors that can be combined or co-administered are disclosed in U.S. Pat. Nos. 10,294,234, US2020030327 and US2019210978.

### HIV Ribonuclease H Inhibitors

[0315] In certain embodiments, the one or more multi-specific antigen binding molecules described herein are combined or co-administered with an HIV ribonuclease H inhibitor. Examples of HIV ribonuclease H inhibitors that can be combined with the one or more multi-specific antigen binding molecules described herein include NSC-727447.

### HIV Nef Inhibitors

[0316] In certain embodiments, the one or more multi-specific antigen binding molecules described herein are combined or co-administered with an HIV Nef inhibitor. Examples of HIV Nef inhibitors that can be combined with the one or more multi-specific antigen binding molecules described herein include FP-1.

### HIV Reverse Transcriptase Inhibitors

[0317] In certain embodiments, the one or more multi-specific antigen binding molecules described herein are combined or co-administered with a non-nucleoside or non-nucleotide inhibitor. Examples of HIV non-nucleoside or non-nucleotide inhibitors of reverse transcriptase that can be combined with the one or more multi-specific antigen binding molecules, described herein, include dapivirine, delavirdine, delavirdine mesylate, doravirine, efavirenz, etravirine, lentinan, nevirapine, rilpivirine, ACC-007, ACC-008, AIC-292, F-18, KM-023, PC-1005, M1-TFV, M2-TFV, VM-1500A-LAI, PF-3450074, elsulfavirine (sustained release oral, HIV infection), doravirine+islatravir (fixed dose combination/oral tablet formulation, HIV-1 infection), elsulfavirine (long-acting injectable nanosuspension, HIV infection), and elsulfavirine (VM-1500).

[0318] In certain embodiments, the one or more multi-specific antigen binding molecules described herein are combined or co-administered with long acting anti-HIV regimen. Examples of drugs that are being developed as long acting anti-HIV regimens that can be co-administered include without limitation cabotegravir LA, rilpivirine LA, cabotegravir LA+rilpivirine LA, elvitegravir (extended release), lenacapavir long acting, raltegravir long acting, darunavir long acting, any integrase LA, VM-1500A-LAI, VM-3500, maraviroc (LAI), T-1144, ODE-Bn-TFV, CP-112, S-648414, tenofovir implant, tenofovir long acting, tenofovir prodrug long acting, islatravir (MK-8591) subdermal implant, long-acting dolutegravir, long acting raltegravir+lamivudine, transdermal devices that can deliver HIV drugs, such as transdermal tenofovir (WO2020092990).

[0319] In certain embodiments, the one or more multi-specific antigen binding molecules described herein are combined or co-administered with an HIV nucleoside or nucleotide inhibitor. Examples of HIV nucleoside or nucleotide inhibitors of reverse transcriptase that can be combined with the one or more multi-specific antigen binding molecules, described herein, include adefovir, adefovir dipivoxil, azvudine, emtricitabine, tenofovir, tenofovir alafenamide, tenofovir alafenamide fumarate, tenofovir alafenamide hemifumarate, tenofovir disoproxil, tenofovir disoproxil fumarate, tenofovir octadecyloxyethyl ester (AGX-1009), tenofovir disoproxil hemifumarate, VIDEX® and VIDEX EC® (didanosine, ddl), abacavir, abacavir sulfate, alovudine, apricitabine, censavudine, didanosine, elvucitabine, festinavir, fosalvudine tidoxil, CMX-157, dapivirine, doravirine, etravirine, OCR-5753, tenofovir disoproxil orotate, fozivudine tidoxil, lamivudine, phosphazid, stavudine, zalcitabine, zidovudine, rovafovir etalafenamide (GS-9131), GS-9148, MK-8504, islatravir (MK-8591), MK-8583, VM-2500 and KP-1461.

[0320] Additional examples of HIV nucleoside or nucleotide inhibitors of reverse transcriptase include, but are not limited to those described in US patent No. US2007049754, US2016250215, US2016237062, US2016251347; US2002119443, US2013065856, US2013090473, US2014221356; and WO04096286.

### HIV Integrase Inhibitors

[0321] In certain embodiments, the one or more multi-specific antigen binding molecules described herein are combined or co-administered with an HIV integrase inhibitor. Examples of HIV integrase inhibitors that can be combined with the one or more multi-specific antigen binding molecules, described herein, include elvitegravir, elvitegravir (extended-release microcapsules), curcumin, derivatives of curcumin, chicoric acid, derivatives of chicoric acid, 3,5-dicaffeoylquinic acid, derivatives of 3,5-dicaffeoylquinic acid, aurintricarboxylic acid, derivatives of aurintricarboxylic acid, caffeic acid phenethyl ester, derivatives of caffeic acid phenethyl ester, tyrphostin, derivatives of tyrphostin, quercetin, derivatives of quercetin, raltegravir, PEGylated raltegravir, dolutegravir, JTK-351, bictegravir, AVX-15567, cabotegravir, cabotegravir (long-acting injectable), diketo quinolin-4-1 derivatives, integrase-LEDGF inhibitor, ledgins, M-522, M-532, MK-0536, NSC-310217, NSC-371056, NSC-48240, NSC-642710, NSC-699171, NSC-699172, NSC-699173, NSC-699174, stilbenedisulfonic acid, T-169, STP-0404, VM-3500, XVIR-110, and ACC-017.

[0322] In certain embodiments, the one or more multi-specific antigen binding molecules described herein are combined or co-administered with a HIV non-catalytic site, or allosteric, integrase inhibitor (NCINI). Examples of HIV non-catalytic site, or allosteric, integrase inhibitors (NCINI) that can be combined with the one or more multi-specific antigen binding molecules, described herein, include CX-05045, CX-05168, and CX-14442. Additional examples of HIV capsid inhibitors that can be combined or co-administered include without limitation those described in U.S. Pat. Nos. US2014221356 and US2016016973.

### HIV Viral Infectivity Factor Inhibitor

[0323] In certain embodiments, the one or more multi-specific antigen binding molecules described herein are combined or co-administered with an HIV viral infectivity factor inhibitor. Examples of HIV viral infectivity factor inhibitors that can be combined with the one or more multi-specific antigen binding molecules described herein include 2-amino-N-(2-methoxyphenyl)-6-((4-nitrophenyl)thio)benzamide derivatives, and Irino-L.

### HIV Entry (Fusion) Inhibitors

[0324] In certain embodiments, the one or more multi-specific antigen binding molecules described herein are combined or co-administered with an HIV entry (fusion) inhibitor. Examples of HIV entry (fusion) inhibitors that can be combined with the one or more multi-specific antigen binding molecules, described herein, include AAR-501, LBT-5001, cenicriviroc, CCR5 inhibitors, gp41 inhibitors, CD4 attachment inhibitors, gp120 inhibitors, gp160 inhibitors, CXCR4 inhibitors and D-peptide HIV entry inhibitors (e.g., cholesterol-PIE12-trimer (CPT31)).

[0325] In certain embodiments, the one or more multi-specific antigen binding molecules described herein are combined or co-administered with a C-C motif chemokine receptor 5 (CCR5; NCBI Gene ID: 1234) inhibitor. Examples of CCR5 inhibitors that can be combined with the one or more multi-specific antigen binding molecules, described herein, include aplaviroc, MK-7690 (vicriviroc), maraviroc, maraviroc (long-acting injectable nanoemulsion), cenicriviroc, leronlimab (PRO-140), adaptavir (RAP-101), nifeviroc (TD-0232), anti-GP120/CD4 or CCR5 bispecific antibodies, B-07, MB-66, polypeptide C25P, TD-0680, thioraviroc, vMIP (Haimipu), CCR5/CCR2 dual inhibitors, e.g., cenicriviroc, BMS-813160.

[0326] In certain embodiments, the one or more multi-specific antigen binding molecules described herein are combined or co-administered with a CXCR4 inhibitor. Examples of CXCR4 inhibitors that can be combined with the one or more multi-specific antigen binding molecules, described herein, include plerixafor, ALT-1188, N15 peptide, vMIP (Haimipu), BL-8040, LY2510924, burixafor (TG-0054), X4P-002 and X4P-001-IO.

[0327] In certain embodiments, the one or more multi-specific antigen binding molecules described herein are combined or co-administered with a gp41 inhibitor. Examples of gp41 inhibitors that can be combined with the one or more multi-specific antigen binding molecules, described herein, include albuvirtide, enfuvirtide, griffithsin (gp41/gp120/gp160 inhibitor), BMS-986197, enfuvirtide biobetter, enfuvirtide biosimilar, HIV-1 fusion inhibitors (P26-Bapc), ITV-1, ITV-2, ITV-3, ITV-4, CPT-31, Cl3hmAb, lipuvirtide, PIE-12 trimer and sifuvirtide.

[0328] In certain embodiments, the one or more multi-specific antigen binding molecules described herein are combined or co-administered with a CD4 attachment inhibitor. Examples of CD4 attachment inhibitors that can be combined with the one or more multi-specific antigen binding molecules, described herein, include ibalizumab and CADA analogs.

[0329] In certain embodiments, the one or more multi-specific antigen binding molecules described herein are combined or co-administered with a gp120 inhibitor. Examples of gp120 inhibitors that can be combined with the one or more multi-specific antigen binding molecules, described herein, include anti-HIV microbicide, Radha-108 (receptol) 3B3-PE38, BMS818251, BanLec, bentonite-based nanomedicine, fostemsavir tromethamine, IQP-0831, VVX-004, and BMS-663068.

[0330] In certain embodiments, the one or more multi-specific antigen binding molecules described herein are combined or co-administered with a gp160 inhibitor. Examples of gp160 inhibitors that can be combined with the one or more multi-specific antigen binding molecules described herein include fangchinoline.

### HIV Maturation Inhibitors

[0331] In certain embodiments, the one or more multi-specific antigen binding molecules described herein are combined or co-administered with an HIV maturation inhibitor. Examples of HIV maturation inhibitors that can be combined with the one or more multi-specific antigen binding molecules, described herein, include BMS-955176, GSK-3640254 and GSK-2838232.

### Capsid Inhibitors

[0332] In certain embodiments, the one or more multi-specific antigen binding molecules described herein are combined or co-administered with a capsid inhibitor. Examples of capsid inhibitors that can be combined with the one or more multi-specific antigen binding molecules, described herein, include capsid polymerization inhibitors or capsid disrupting compounds, HIV nucleocapsid p7 (NCp7) inhibitors such as azodicarbonamide, HIV p24 capsid protein inhibitors, lenacapavir (GS-6207), GS-CA1, AVI-621, AVI-101, AVI-201, AVI-301, and AVI-CAN1-15 series, PF-3450074, HIV-1 capsid inhibitors (HIV-1 infection, Shandong University), and compounds described in Intl. Patent Publ. No. WO2019/087016. Additional examples of capsid inhibitors that can be combined or co-administered include without limitation those described in U.S. Patent Publ. Nos. US2018051005 and US2016108030.

### Cytochrome P450 3 Inhibitors

[0333] In certain embodiments, the one or more multi-specific antigen binding molecules described herein are combined or co-administered with a cytochrome P450 3 inhibitor. Examples of Cytochrome P450 3 inhibitors that can be combined or co-administered include without limitation those described in U.S. Pat. No. 7,939,553.

### RNA Polymerase Modulators

[0334] In certain embodiments, the one or more multi-specific antigen binding molecules described herein are combined or co-administered with a RNA polymerase modulator (e.g., inhibitor). Examples of RNA polymerase modulators (e.g., inhibitors) include without limitation those described in U.S. Pat. Nos. 10,065,958 and 8,008,264. Latency Reversing Agents

[0335] In certain embodiments, the one or more multi-specific antigen binding molecules described herein are combined or co-administered with an HIV latency reversing agent. Examples of latency reversing agents that can be combined with the one or more multi-specific antigen binding molecules, described herein, include IL-15 receptor agonists (e.g., ALT-803; interleukin-15/Fc fusion protein (e.g., XmAb24306); recombinant interleukin-15 (e.g., AM0015, NIZ-985); pegylated IL-15 (e.g., NKTR-255)); toll-like receptor (TLR) agonists (including TLR7 agonists, e.g., GS-9620 and TLR8 agonists, e.g., selgantolimod (GS-9688)), TLR9 agonists, e.g., lefitolimod (MGN-1703)), histone deacetylase (HDAC) inhibitors, proteasome inhibitors such as velcade, protein kinase C (PKC) activators, Smyd2 inhibitors, BET-bromodomain 4 (BRD4) inhibitors (such as ZL-0580, apabetalone), ionomycin, IAP antagonists (inhibitor of apoptotis proteins, such as APG-1387, LBW-242), SMAC mimetics (including including ciapavir, BI-891065, TL32711, LCL161, GDC-0917, HGS1029, AT-406, APG-1387, LCL-161 (NVP-LCL161)), Debio-1143), PMA, SAHA (suberanilohydroxamic acid, or suberoyl, anilide, and hydroxamic acid), NIZ-985, IL-15 modulating antibodies (including IL-15, IL-15 fusion proteins and IL-15 receptor agonists, e.g., ALT-803), JQ1, disulfiram, amphotericin B, and ubiquitin inhibitors such as largazole analogs, APH-0812, and GSK-343. Examples of HDAC inhibitors include romidepsin, vorinostat, and panobinostat. Examples of PKC activators include indolactam, prostratin, ingenol B, and DAG-lactones. Additional examples of TLR7 agonists that can be combined or co-administered include without limitation described in U.S. Patent Publ. No. US2010143301. Additional examples of TLR8 agonists that can be combined or co-administered include without limitation described in U.S. Patent Publ. No. US2017071944.

### Histone Deacetylase (HDAC) Inhibitors

[0336] In various embodiments, the one or more multi-specific antigen binding molecules as described herein, are combined or co-administered with an inhibitor of a histone deacetylase, e.g., histone deacetylase 1 (HDAC1; NCBI Gene ID: 3065), histone deacetylase 2 (HDAC2; NCBI Gene ID: 3066), histone deacetylase 3 (HDAC3; NCBI Gene ID: 8841), histone deacetylase 4 (HDAC4; NCBI Gene ID: 9759), histone deacetylase 5 (HDAC5; NCBI Gene ID: 10014), histone deacetylase 6 (HDAC6; NCBI Gene ID: 10013), histone deacetylase 7 (HDAC7; NCBI Gene ID: 51564), histone deacetylase 8 (HDAC8; NCBI Gene ID: 55869), histone deacetylase 9 (HDAC9; NCBI Gene ID: 9734), histone deacetylase 11 (HDAC11; NCBI Gene ID: 79885). Examples of HDAC inhibitors that can be combined with the one or more multi-specific antigen binding molecules, described herein, include without limitation, abexinostat, ACY-241, AR-42, BEBT-908, belinostat, CKD-581, CS-055 (HBI-8000), CT-101, CUDC-907 (fimepinostat), entinostat, givinostat, mocetinostat, panobinostat, pracinostat, quisinostat (JNJ-26481585), resminostat, ricolinostat, romidepsin, SHP-141, TMB-ADC, valproic acid (VAL-001), vorinostat, tinostamustine, remetinostat, and entinostat.

### Immune-Based Therapies

[0337] In certain embodiments, the one or more multi-specific antigen binding molecules described herein are combined or co-administered with an immune-based therapy. Examples of immune-based therapies include agonists or stimulators of a toll-like receptor (TLR) (e.g., one or more of TLR1, TLR2, TLR3, TLR4, TLR5, TLR6, TLR7, TLR8, TLR9, and TLR10); programmed cell death protein 1 (PD-1) modulators; programmed death-ligand 1 (PD-L1) modulators; IL-15 receptor agonists (e.g., ALT-803; interleukin-15/Fc fusion protein (e.g., XmAb24306); recombinant interleukin-15 (e.g., AM0015, NIZ-985); pegylated IL-15 (e.g., NKTR-255)); DermaVir; interleukin-7; plaquenil (hydroxychloroquine); proleukin (aldesleukin, IL-2); interferon alfa; interferon alfa-2b; interferon alfa-n3; pegylated interferon alfa; interferon gamma; hydroxyurea; mycophenolate mofetil (MPA) and its ester derivative mycophenolate mofetil (MMF); ribavirin; polymer polyethyleneimine (PEI); gepon; IL-12; WF-10; VGV-1; MOR-22; BMS-936559; CYT-107, normferon, peginterferon alfa-2a, peginterferon alfa-2b, RPI-MN, STING modulators, RIG-I modulators, NOD2 modulators, SB-9200, and IR-103.

### Toll-Like Receptor (TLR) Agonists

[0338] In various embodiments, the one or more multi-specific antigen binding molecules as described herein, are combined or co-administered with an agonist of a toll-like receptor (TLR), e.g., an agonist of one or more of TLR1, TLR2, TLR3, TLR4, TLR5, TLR6, TLR7, TLR8, TLR9, and TLR10). Example TLR7 agonists that can be co-administered or combined with the one or more multi-specific antigen binding molecules, described herein, include without limitation AL-034, DSP-0509, GS-9620 (vesatolimod), vesatolimod analogs, LHC-165, TMX-101 (imiquimod), GSK-2245035, resiquimod, DSR-6434, DSP-3025, IMO-4200, MCT-465, MEDI-9197, 3M-051, SB-9922, 3M-052, Limtop, TMX-30X, TMX-202, RG-7863, RG-7854, RG-7795, and the compounds disclosed in US20100143301 (Gilead Sciences), US20110098248 (Gilead Sciences), and US20090047249 (Gilead Sciences), US20140045849 (Janssen), US20140073642 (Janssen), WO2014/056953 (Janssen), WO2014/076221 (Janssen), WO2014/128189 (Janssen), US20140350031 (Janssen), WO2014/023813 (Janssen), US20080234251 (Array Biopharma), US20080306050 (Array Biopharma), US20100029585 (Ventirx Pharma), US20110092485 (Ventirx Pharma), US20110118235 (Ventirx Pharma), US20120082658 (Ventirx Pharma), US20120219615 (Ventirx Pharma), US20140066432 (Ventirx Pharma), US20140088085 (Ventirx Pharma), US20140275167 (Novira Therapeutics), and US20130251673 (Novira Therapeutics). An TLR7/TLR8 agonist that can be co-administered is NKTR-262, telratolimod and BDB-001. Example TLR8 agonists that can be co-administered or combined with the one or more multi-specific antigen binding molecules, described herein, include without limitation E-6887, IMO-4200, IMO-8400, IMO-9200, MCT-465, MEDI-9197, motolimod, resiquimod, selgantolimod (GS-9688), VTX-1463, VTX-763, 3M-051, 3M-052, and the compounds disclosed in US20140045849 (Janssen), US20140073642 (Janssen), WO2014/056953 (Janssen), WO2014/076221 (Janssen), WO2014/128189 (Janssen), US20140350031 (Janssen), WO2014/023813 (Janssen), US20080234251 (Array Biopharma), US20080306050 (Array Biopharma), US20100029585 (Ventirx Pharma), US20110092485 (Ventirx Pharma), US20110118235 (Ventirx Pharma), US20120082658 (Ventirx Pharma), US20120219615 (Ventirx Pharma), US20140066432 (Ventirx Pharma), US20140088085 (Ventirx Pharma), US20140275167 (Novira Therapeutics), and US20130251673 (Novira Therapeutics). Example TLR9 agonists that can be co-administered include without limitation AST-008, cobitolimod, CMP-001, IMO-2055, IMO-2125, S-540956, litenimod, MGN-1601, BB-001, BB-006, IMO-3100, IMO-8400, IR-103, IMO-9200, agatolimod, DIMS-9054, DV-1079, DV-1179, AZD-1419, lefitolimod (MGN-1703), CYT-003, CYT-003-QbG10, tilsotolimod and PUL-042. Examples of TLR3 agonist include rintatolimod, poly-ICLC, RIBOXXON®, Apoxxim, RIBOXXIM®, IPH-33, MCT-465, MCT-475, and ND-1.1. Examples of TLR4 agonist include G-100, and GSK-1795091.

### CDK Inhibitors or Antagonists

[0339] In certain embodiments, the one or more multi-specific antigen binding molecules described herein are combined or co-administered with inhibitor of cyclin dependent kinase 1 (CDK1, CDC2; CDC28A; P34CDC2; NCBI Gene ID: 983); cyclin dependent kinase 2 (CDK2, CDKN2; p33(CDK2); NCBI Gene ID: 1017); cyclin dependent kinase 3 (CDK3; NCBI Gene ID: 1018); cyclin dependent kinase 4 (CDK4, CMM3; PSK-J3; NCBI Gene ID: 1019); cyclin dependent kinase 6 (CDK6, MCPH12; PLSTIRE; NCBI Gene ID: 1021); cyclin dependent kinase 7 (CDK7, CAK; CAK1; HCAK; MO15; STK1; CDKN7; p39MO15; NCBI Gene ID: 1022); cyclin dependent kinase 9 (CDK9, TAK; C-2k; CTK1; CDC2L4; PITALRE; NCBI Gene ID: 1025). Inhibitors of one or more of CDK 1, 2, 3, 4, 6, 7 and 9 that can be combined or co-administered include without limitation abemaciclib, alvocidib (HMR-1275, flavopiridol), AT-7519, dinaciclib, ibrance, FLX-925, LEE001, palbociclib, ribociclib, rigosertib, selinexor, UCN-01, SY1365, CT-7001, SY-1365, G1T38, milciclib, trilaciclib, PF-06873600, AZD4573, and TG-02. In some embodiments, the CDK4/CDK6/CDK9 inhibitor or antagonist is selected from the group consisting of VS2-370.

### Stimulator of Interferon Genes (STING) Agonists

[0340] In some embodiments, the one or more multi-specific antigen binding molecules described herein are combined or co-administered with an agonist of stimulator of interferon response cGAMP interactor 1 (STING1; NCBI Gene ID: 340061). In some embodiments, the STING receptor agonist or activator is selected from the group consisting of ADU-S100 (MIW-815), SB-11285, MK-1454, SR-8291, AdVCA0848, GSK-532, SYN-STING, MSA-1, SR-8291, STING agonist (latent HIV), GSK3745417, 5,6-dimethylxanthenone-4-acetic acid (DMXAA), cyclic-GAMP (cGAMP) and cyclic-di-AMP.

### RIG-I Agonists

[0341] In certain embodiments, the one or more multi-specific antigen binding molecules described herein are combined or co-administered with an agonist of DExD/H-box helicase 58 (DDX58; a.k.a., RIG-I, RIG1, RIGI, RLR-1, SGMRT2; NCBI Gene ID: 23586). In some embodiments, the agents described herein are combined or co-administered with a RIG-I modulator such as RGT-100, or NOD2 modulator, such as SB-9200 (a.k.a., GS 9992; inarigivir soproxil), and IR-103. An illustrative RIG-I agonist is KIN1148, described by Hemann, et al., J Immunol May 1, 2016, 196 (1 Supplement) 76.1. Additional RIG-I agonists are described, e.g., in Elion, et al., Cancer Res. (2018) 78(21):6183-6195; and Liu, et al., J Virol. (2016) 90(20):9406-19. RIG-I agonists are commercially available, e.g., from Invivogen (invivogen.com).

### LAG-3 and TIM-3 Inhibitors

[0342] In certain embodiments, the one or more multi-specific antigen binding molecules described herein are combined or co-administered with an anti-TIM-3 (a.k.a., hepatitis A virus cellular receptor 2 antibody (HAVCR2; NCBI Gene ID: 84868), such as TSR-022, LY-3321367, MBG-453, INCAGN-2390. In some embodiments, the one or more multi-specific antigen binding molecules described herein are combined or co-administered with an anti-lymphocyte activating 3 (LAG3, a.k.a., CD223; NCBI Gene ID: 3902) antibody, such as relatlimab (ONO-4482), LAG-525, MK-4280, REGN-3767, INCAGN2385.

### Cytokine Receptor Agonists

[0343] In various embodiments, the one or more multi-specific antigen binding molecules described herein are combined or co-administered with one or more cytokine receptor or chemokine receptor agonists. Illustrative cytokine or chemokine receptor agonists that can be co-administered include without limitation IL-12, IL-18, gamma chain-dependent cytokines (e.g., IL-2, IL-7, IL-9, IL-15 and IL-21) and fms related tyrosine kinase 3 (FLT3) ligand (FLT3LG).

[0344] Examples of IL-2 receptor agonists that can be combined or co-administered include proleukin (aldesleukin, IL-2); BC-IL (Cel-Sci), pegylated IL-2 (e.g., NKTR-214 (bempegaldesleukin)); modified variants of IL-2 (e.g., THOR-707), AIC-284, ALKS-4230, CUI-101 and Neo-2/15.

[0345] Examples of IL-15 receptor agonists that can be combined or co-administered include without limitation PRGN-3006, ALT-803, NKTR-255, and hetIL-15, interleukin-15/Fc fusion protein (e.g., XmAb24306); recombinant interleukin-15 (e.g., AM0015, NIZ-985); pegylated IL-15 (e.g., NKTR-255, Synthorin), hetIL-15, SO-C101, P-22339, and the IL-15-PD-1 fusion protein N-809.

[0346] Examples of IL-12 receptor agonists that can be combined or co-administered include IL-12A (NCBI Gene ID: 3592)+IL-12B (NCBI Gene ID: 3593) mRNAs, such as MEDI1191; IL-12 gene stimulators, such as EGEN-001, tavokinogene telseplasmid; dendritic cells transduced to express IL-12, such as DC-RTS-IL-12; autologous T-Cells genetically engineered to secrete IL-12 and to target the mucin 16, cell surface associated (MUC16, a.k.a., CA125; NCBI Gene ID: 94025), such as JCAR-020; and mRNA encoding the cytokines interleukin-12 single chain (IL-12sc), interleukin-15+IL15RA sushi domain (IL-15sushi), interferon alpha (IFNα) and granulocyte-macrophage colony-stimulating factor (GM-CSF), such as SAR441000 (BNT131).

[0347] An illustrative IL-7 receptor agonist that can be co-administered includes CYT-107.

[0348] Illustrative fms related tyrosine kinase 3 (FLT3) ligand (FLT3LG) agonists that can be combined or co-administered include GS-3583 and CDX-301.

### Interferon Receptor Ligands

[0349] In various embodiments, the one or more multi-specific antigen binding molecules described herein are combined or co-administered with one or more interferon receptor (e.g., interferon alpha and beta receptor subunit 1 (IFNAR1; NCBI Gene ID: 3454); interferon alpha and beta receptor subunit 2 (IFNAR2; NCBI Gene ID: 3455); interferon gamma receptor 1 (IFNGR1; NCBI Gene ID: 3459); interferon gamma receptor 2 (IFNGR2; NCBI Gene ID: 3460) ligands, which can be one or more of recombinant, PEGylated, fusion proteins and conjugates. Examples of interferon receptor ligands that can be combined or co-administered include an interferon alpha-1b, an interferon alpha-2a, an interferon alpha-2b, an interferon beta-1a, and an interferon gamma. Illustrative interferon alpha-1b that can be combined or co-administered include without limitation, recombinant human interferon alpha-1b, interferon alpha 1b, PEGylated interferon alpha-1b, interferon alpha 1b (HAPGEN®). Illustrative interferon alpha-2a that can be combined or co-administered include without limitation, recombinant human interferon alpha-2a, interferon alfa 2a, PEG-IFN-alpha, pegylated interferon alpha-2a (PEGASYS®), YPEG-interferon alfa-2a (YPEG-rhIFNalpha-2a), interferon alpha-2a biosimilar (Biogenomics), rHSA-IFN alpha-2a (recombinant human serum albumin interferon alpha 2a fusion protein), interferon alfa-2a follow-on biologic (Biosidus)(Inmutag, Inter 2A). Illustrative interferon alpha-2b that can be combined or co-administered include without limitation, recombinant human interferon alpha-2b, alpha-2b (INTRON A®), interferon alfa-2b (from numerous sources, including, e.g., Amega, Axxo, IFN, Laboratorios Bioprofarma, Virchow, Zydus-Cadila, BioGeneric Pharma, Changchun Institute of Biological Products), ropeginterferon alfa-2b (AOP-2014, P-1101, PEG IFN alpha-2b), peginterferon alfa-2b (Amega), Ypeginterferon alfa-2b (YPEG-rhIFNalpha-2b), peginterferon alfa-2b (PEG-INTRON®), rHSA-IFN alpha 2b (recombinant human serum albumin interferon alpha 2b fusion protein), veltuzumab-IFN alpha 2b conjugate, interferon alfa-2b follow-on biologic (Biosidus-Bioferon, Citopheron, Ganapar, Beijing Kawin Technology—Kaferon). Additional illustrative interferon alpha and beta receptor ligands that can be combined or co-administered include without limitation Veldona, Infradure, Roferon-A, Algeron, Alfarona, Ingaron (interferon gamma), rSIFN-co (recombinant super compound interferon), MOR-22, Bioferon, Novaferon, Inmutag (Inferon), MULTIFERON® (Alfanative, Viragen), interferon alfa-n1(HUMOFERON®, SM-10500, Sumiferon), Shaferon, Alfaferone, interferon-alpha 2 (CJ), Laferonum, VIPEG, BLAUFERON-A, BLAUFERON-B, Dynavax (SD-101), Intermax Alpha, Realdiron, Lanstion, Pegaferon, PDferon-B PDferon-B, Pegnano, Feronsure, PegiHep, Optipeg A, Realfa 2B, Reliferon, Reaferon-EC, Roferon-A (Canferon, Ro-25-3036), Proquiferon, Uniferon, Urifron, Anterferon, Shanferon, Layfferon, Shang Sheng Lei Tai, INTEFEN, SINOGEN, Fukangtai, Pegstat, SFR-9216, Interapo (Interapa), GEPON®, NORMFERON™. Illustrative interferon beta-1a that can be combined or co-administered include without limitation, interferon beta-1a (AVONEX®). Illustrative interferon gamma receptor ligands that can be combined or co-administered include without limitation, interferon gamma (OH-6000, Ogamma 100) and RPI-MN (modified cobratoxin).

### Immune Checkpoint Receptor Protein Modulators

[0350] In various embodiments, the one or more multi-specific antigen binding molecules described herein are combined or co-administered with one or more blockers or inhibitors of inhibitory immune checkpoint proteins or receptors and/or with one or more stimulators, activators or agonists of one or more stimulatory immune checkpoint proteins or receptors. Blockade or inhibition of inhibitory immune checkpoints can positively regulate T-cell or NK cell activation and prevent immune escape of infected cells. Activation or stimulation of stimulatory immune check points can augment the effect of immune checkpoint inhibitors in infective therapeutics. In various embodiments, the immune checkpoint proteins or receptors regulate T cell responses (e.g., reviewed in Xu, et al., J Exp Clin Cancer Res. (2018) 37:110). In various embodiments, the immune checkpoint proteins or receptors regulate NK cell responses (e.g., reviewed in Davis, et al., Semin Immunol. (2017) 31:64-75 and Chiossone, et al., Nat Rev Immunol. (2018) 18(11):671-688).

[0351] Examples of immune checkpoint proteins or receptors that can be combined with the one or more multi-specific antigen binding molecules described herein include without limitation CD27 (NCBI Gene ID: 939); CD70 (NCBI Gene ID: 970); CD40 (NCBI Gene ID: 958); CD40LG (NCBI Gene ID: 959); CD47 (NCBI Gene ID: 961); CD48 (SLAMF2; NCBI Gene ID: 962); transmembrane and immunoglobulin domain containing 2 (TMIGD2, CD28H; NCBI Gene ID: 126259); CD84 (LY9B, SLAMF5; NCBI Gene ID: 8832); CD96 (NCBI Gene ID: 10225); CD160 (NCBI Gene ID: 11126); MS4A1 (CD20; NCBI Gene ID: 931); CD244 (SLAMF4; NCBI Gene ID: 51744); CD276 (B7H3; NCBI Gene ID: 80381); V-set domain containing T cell activation inhibitor 1 (VTCN1, B7H4; NCBI Gene ID: 79679); V-set immunoregulatory receptor (VSIR, B7H5, VISTA; NCBI Gene ID: 64115); immunoglobulin superfamily member 11 (IGSF11, VSIG3; NCBI Gene ID: 152404); natural killer cell cytotoxicity receptor 3 ligand 1 (NCR3LG1, B7H6; NCBI Gene ID: 374383); HERV-H LTR-associating 2 (HHLA2, B7H7; NCBI Gene ID: 11148); inducible T cell co-stimulator (ICOS, CD278; NCBI Gene ID: 29851); inducible T cell co-stimulator ligand (ICOSLG, B7H2; NCBI Gene ID: 23308); TNF receptor superfamily member 4 (TNFRSF4, OX40; NCBI Gene ID: 7293); TNF superfamily member 4 (TNFSF4, OX40L; NCBI Gene ID: 7292); TNFRSF8 (CD30; NCBI Gene ID: 943); TNFSF8 (CD30L; NCBI Gene ID: 944); TNFRSF10A (CD261, DR4, TRAILR1; NCBI Gene ID: 8797); TNFRSF9 (CD137; NCBI Gene ID: 3604); TNFSF9 (CD137L; NCBI Gene ID: 8744); TNFRSF10B (CD262, DR5, TRAILR2; NCBI Gene ID: 8795); TNFRSF10 (TRAIL; NCBI Gene ID: 8743); TNFRSF14 (HVEM, CD270; NCBI Gene ID: 8764); TNFSF14 (HVEML; NCBI Gene ID: 8740); CD272 (B and T lymphocyte associated (BTLA); NCBI Gene ID: 151888); TNFRSF17 (BCMA, CD269; NCBI Gene ID: 608); TNFSF13B (BAFF; NCBI Gene ID: 10673); TNFRSF18 (GITR; NCBI Gene ID: 8784); TNFSF18 (GITRL; NCBI Gene ID: 8995); MHC class I polypeptide-related sequence A (MICA; NCBI Gene ID: 100507436); MHC class I polypeptide-related sequence B (MICB; NCBI Gene ID: 4277); CD274 (CD274, PDL1, PD-L1; NCBI Gene ID: 29126); programmed cell death 1 (PDCD1, PD1, PD-1; NCBI Gene ID: 5133); cytotoxic T-lymphocyte associated protein 4 (CTLA4, CD152; NCBI Gene ID: 1493); CD80 (B7-1; NCBI Gene ID: 941); CD28 (NCBI Gene ID: 940); nectin cell adhesion molecule 2 (NECTIN2, CD112; NCBI Gene ID: 5819); CD226 (DNAM-1; NCBI Gene ID: 10666); Poliovirus receptor (PVR) cell adhesion molecule (PVR, CD155; NCBI Gene ID: 5817); PVR related immunoglobulin domain containing (PVRIG, CD112R; NCBI Gene ID: 79037); T cell immunoreceptor with Ig and ITIM domains (TIGIT; NCBI Gene ID: 201633); T cell immunoglobulin and mucin domain containing 4 (TIMD4; TIM4; NCBI Gene ID: 91937); hepatitis A virus cellular receptor 2 (HAVCR2, TIMD3, TIM3; TIM-3; NCBI Gene ID: 84868); galectin 9 (LGALS9; NCBI Gene ID: 3965); lymphocyte activating 3 (LAG3, LAG-3; CD223; NCBI Gene ID: 3902); signaling lymphocytic activation molecule family member 1 (SLAMF1, SLAM, CD150; NCBI Gene ID: 6504); lymphocyte antigen 9 (LY9, CD229, sialic acid binding Ig like lectin 7 (SIGLEC7; p75; QA79; AIRM1; CD328; CDw328; D-siglec; SIGLEC-7; SIGLECP2; SIGLECI9P; p75/AIRM1; NCBI Gene ID: 27036); sialic acid binding Ig like lectin 9 (SIGLEC9; CD329; CDw329; FOAP-9; siglec-9; OBBP-LIKE; NCBI Gene ID: 27180); SLAMF3; NCBI Gene ID: 4063); SLAM family member 6 (SLAMF6, CD352; NCBI Gene ID: 114836); SLAM family member 7 (SLAMF7, CD319; NCBI Gene ID: 57823); UL16 binding protein 1 (ULBP1; NCBI Gene ID: 80329); UL16 binding protein 2 (ULBP2; NCBI Gene ID: 80328); UL16 binding protein 3 (ULBP3; NCBI Gene ID: 79465); retinoic acid early transcript 1E (RAET1E; ULBP4; NCBI Gene ID: 135250); retinoic acid early transcript 1G (RAET1G; ULBP5; NCBI Gene ID: 353091); retinoic acid early transcript 1L (RAET1L; ULBP6; NCBI Gene ID: 154064); killer cell lectin like receptor C1 (KLRC1, NKG2A, CD159A; NCBI Gene ID: 3821); killer cell lectin like receptor K1 (KLRK1, NKG2D, CD314; NCBI Gene ID: 22914); killer cell lectin like receptor C2 (KLRC2, CD159c, NKG2C; NCBI Gene ID: 3822); killer cell lectin like receptor C3 (KLRC3, NKG2E; NCBI Gene ID: 3823); killer cell lectin like receptor C4 (KLRC4, NKG2F; NCBI Gene ID: 8302); killer cell lectin like receptor D1 (KLRD1; NCBI Gene ID: 3824); killer cell lectin like receptor G1 (KLRG1; 2F1; MAFA; MAFA-L; CLEC15A; MAFA-2F1; MAFA-LIKE; NCBI Gene ID: 10219); killer cell immunoglobulin like receptor, two Ig domains and long cytoplasmic tail 1 (KIR2DL1; NCBI Gene ID: 3802); killer cell immunoglobulin like receptor, two Ig domains and long cytoplasmic tail 2 (KIR2DL2; NCBI Gene ID: 3803); killer cell immunoglobulin like receptor, two Ig domains and long cytoplasmic tail 3 (KIR2DL3; NCBI Gene ID: 3804); killer cell immunoglobulin like receptor, three Ig domains and long cytoplasmic tail 1 (KIR3DL1, KIR, CD158E1; NCBI Gene ID: 3811) (e.g., Lirilumab (IPH2102/BMS-986015), IPH-4102) and Hematopoietic Progenitor Kinase 1 (HPK1, MAP4K1).

[0352] In various embodiments, the one or more multi-specific antigen binding molecules described herein are combined or co-administered with one or more blockers or inhibitors of one or more T-cell inhibitory immune checkpoint proteins or receptors. Illustrative T-cell inhibitory immune checkpoint proteins or receptors include without limitation CD274 (CD274, PDL1, PD-L1); programmed cell death 1 ligand 2 (PDCD1LG2, PD-L2, CD273); programmed cell death 1 (PDCD1, PD1, PD-1); cytotoxic T-lymphocyte associated protein 4 (CTLA4, CD152); CD276 (B7H3); V-set domain containing T cell activation inhibitor 1 (VTCN1, B7H4); V-set immunoregulatory receptor (VSIR, B7H5, VISTA); immunoglobulin superfamily member 11 (IGSF11, VSIG3); TNFRSF14 (HVEM, CD270), TNFSF14 (HVEML); CD272 (B and T lymphocyte associated (BTLA)); PVR related immunoglobulin domain containing (PVRIG, CD112R); T cell immunoreceptor with Ig and ITIM domains (TIGIT); lymphocyte activating 3 (LAG3, CD223); hepatitis A virus cellular receptor 2 (HAVCR2, TIMD3, TIM3); galectin 9 (LGALS9); killer cell immunoglobulin like receptor, three Ig domains and long cytoplasmic tail 1 (KIR, CD158E1); killer cell immunoglobulin like receptor, two Ig domains and long cytoplasmic tail 1 (KIR2DL1); killer cell immunoglobulin like receptor, two Ig domains and long cytoplasmic tail 2 (KIR2DL2); killer cell immunoglobulin like receptor, two Ig domains and long cytoplasmic tail 3 (KIR2DL3); and killer cell immunoglobulin like receptor, three Ig domains and long cytoplasmic tail 1 (KIR3DL1). In various embodiments, the one or more multi-specific antigen binding molecules, as described herein, are combined or co-administered with one or more agonist or activators of one or more T-cell stimulatory immune checkpoint proteins or receptors. Illustrative T-cell stimulatory immune checkpoint proteins or receptors include without limitation CD27, CD70; CD40, CD40LG; inducible T cell costimulator (ICOS, CD278); inducible T cell costimulator ligand (ICOSLG, B7H2); TNF receptor superfamily member 4 (TNFRSF4, OX40); TNF superfamily member 4 (TNFSF4, OX40L); TNFRSF9 (CD137), TNFSF9 (CD137L); TNFRSF18 (GITR), TNFSF18 (GITRL); CD80 (B7-1), CD28; nectin cell adhesion molecule 2 (NECTIN2, CD112); CD226 (DNAM-1); CD244 (2B4, SLAMF4), Poliovirus receptor (PVR) cell adhesion molecule (PVR, CD155). See, e.g., Xu, et al., J Exp Clin Cancer Res. (2018) 37:110.

[0353] In various embodiments, the one or more multi-specific antigen binding molecules described herein are combined or co-administered with one or more blockers or inhibitors of one or more NK-cell inhibitory immune checkpoint proteins or receptors. Illustrative NK-cell inhibitory immune checkpoint proteins or receptors include without limitation killer cell immunoglobulin like receptor, three Ig domains and long cytoplasmic tail 1 (KIR, CD158E1); killer cell immunoglobulin like receptor, two Ig domains and long cytoplasmic tail 1 (KIR2DL1); killer cell immunoglobulin like receptor, two Ig domains and long cytoplasmic tail 2 (KIR2DL2); killer cell immunoglobulin like receptor, two Ig domains and long cytoplasmic tail 3 (KIR2DL3); killer cell immunoglobulin like receptor, three Ig domains and long cytoplasmic tail 1 (KIR3DL1); killer cell lectin like receptor C1 (KLRC1, NKG2A, CD159A); and killer cell lectin like receptor D1 (KLRD1, CD94). In various embodiments, the one or more multi-specific antigen binding molecules, as described herein, are combined or co-administered with one or more agonist or activators of one or more NK-cell stimulatory immune checkpoint proteins or receptors. Illustrative NK-cell stimulatory immune checkpoint proteins or receptors include without limitation CD16, CD226 (DNAM-1); CD244 (2B4, SLAMF4); killer cell lectin like receptor K1 (KLRK1, NKG2D, CD314); SLAM family member 7 (SLAMF7). See, e.g., Davis, et al., Semin Immunol. (2017) 31:64-75; Fang, et al., Semin Immunol. (2017) 31:37-54; and Chiossone, et al., Nat Rev Immunol. (2018) 18(11):671-688.

[0354] In some embodiments, the one or more immune checkpoint inhibitors comprises a proteinaceous (e.g., antibody or fragment thereof, or antibody mimetic) inhibitor of PD-L1 (CD274), PD-1 (PDCD1) or CTLA4. In some embodiments, the one or more immune checkpoint inhibitors comprises a small organic molecule inhibitor of PD-L1 (CD274), PD-1 (PDCD1) or CTLA4.

[0355] Examples of inhibitors of CTLA4 that can be co-administered include without limitation ipilimumab, tremelimumab, BMS-986218, AGEN1181, AGEN1884, BMS-986249, MK-1308, REGN-4659, ADU-1604, CS-1002, BCD-145, APL-509, JS-007, BA-3071, ONC-392, AGEN-2041, JHL-1155, KN-044, CG-0161, ATOR-1144, PBI-5D3H5, BPI-002, as well as multi-specific inhibitors FPT-155 (CTLA4/PD-L1/CD28), PF-06936308 (PD-1/CTLA4), MGD-019 (PD-1/CTLA4), KN-046 (PD-1/CTLA4), MEDI-5752 (CTLA4/PD-1), XmAb-20717 (PD-1/CTLA4), and AK-104 (CTLA4/PD-1).

[0356] Examples of inhibitors of PD-L1 (CD274) or PD-1 (PDCD1) that can be co-administered include without limitation pembrolizumab, nivolumab, cemiplimab, pidilizumab, AMP-224, MEDI0680 (AMP-514), spartalizumab, atezolizumab, avelumab, durvalumab, BMS-936559, CK-301, PF-06801591, BGB-A317 (tislelizumab), GLS-010 (WBP-3055), AK-103 (HX-008), AK-105, CS-1003, HLX-10, MGA-012, BI-754091, AGEN-2034, JS-001 (toripalimab), JNJ-63723283, genolimzumab (CBT-501), LZM-009, BCD-100, LY-3300054, SHR-1201, SHR-1210 (camrelizumab), Sym-021, ABBV-181 (budigalimab), PD1-PIK, BAT-1306, (MSB0010718C), CX-072, CBT-502, TSR-042 (dostarlimab), MSB-2311, JTX-4014, BGB-A333, SHR-1316, CS-1001 (WBP-3155, KN-035, IBI-308 (sintilimab), HLX-20, KL-A167, STI-A1014, STI-A1015 (IMC-001), BCD-135, FAZ-053, TQB-2450, MDX1105-01, GS-4224, GS-4416, INCB086550, MAX10181, as well as multi-specific inhibitors FPT-155 (CTLA4/PD-L1/CD28), PF-06936308 (PD-1/CTLA4), MGD-013 (PD-1/LAG-3), FS-118 (LAG-3/PD-L1) MGD-019 (PD-1/CTLA4), KN-046 (PD-1/CTLA4), MEDI-5752 (CTLA4/PD-1), RO-7121661 (PD-1/TIM-3), XmAb-20717 (PD-1/CTLA4), AK-104 (CTLA4/PD-1), M7824 (PD-L1/TGFβ-EC domain), CA-170 (PD-L1/VISTA), CDX-527 (CD27/PD-L1), LY-3415244 (TIM3/PDL1), and INBRX-105 (4-1BB/PDL1).

[0357] In some embodiments, the small molecule inhibitor of CD274 or PDCD1 is selected from the group consisting of GS-4224, GS-4416, INCB086550 and MAX10181. In some embodiments, the small molecule inhibitor of CTLA4 comprises BPI-002.

Inhibitors of T Cell Immunoreceptor with Ig and ITIM Domains (TIGIT)

[0358] In various embodiments, the immunogenic polypeptides, polynucleotides encoding such polypeptides, vectors, LNPs and immunogenic compositions comprising such polypeptides or polynucleotides, as described herein, are combined or co-administered with one or more inhibitors of T cell immunoreceptor with Ig and ITIM domains (TIGIT) (NCBI Gene ID: 201633). Example anti-TIGIT antibodies, that can be combined or co-administered include etigilimab, BMS-986207, tiragolumab (a.k.a., MTIG-7192A; RG-6058; RO 7092284), vibostolimab (MK-7684), ociperlimab (BGB-A1217), domvanalimab (AB154), AGEN1307, AGEN1327, AGEN1777, COM-902, IBI-939, AB154, SGN-TGT, MG1131 and EOS884448 (EOS-448).

### TNF Receptor Superfamily (TNFRSF) Member Agonists or Activators

[0359] In various embodiments, the one or more multi-specific antigen binding molecules described herein are combined or co-administered with an agonist of one or more TNF receptor superfamily (TNFRSF) members, e.g., an agonist of one or more of TNFRSF1A (NCBI Gene ID: 7132), TNFRSF1B (NCBI Gene ID: 7133), TNFRSF4 (OX40, CD134; NCBI Gene ID: 7293), TNFRSF5 (CD40; NCBI Gene ID: 958), TNFRSF6 (FAS, NCBI Gene ID: 355), TNFRSF7 (CD27, NCBI Gene ID: 939), TNFRSF8 (CD30, NCBI Gene ID: 943), TNFRSF9 (4-1BB, CD137, NCBI Gene ID: 3604), TNFRSF10A (CD261, DR4, TRAILR1, NCBI Gene ID: 8797), TNFRSF10B (CD262, DR5, TRAILR2, NCBI Gene ID: 8795), TNFRSF10C (CD263, TRAILR3, NCBI Gene ID: 8794), TNFRSF10D (CD264, TRAILR4, NCBI Gene ID: 8793), TNFRSF11A (CD265, RANK, NCBI Gene ID: 8792), TNFRSF11B (NCBI Gene ID: 4982), TNFRSF12A (CD266, NCBI Gene ID: 51330), TNFRSF13B (CD267, NCBI Gene ID: 23495), TNFRSF13C (CD268, NCBI Gene ID: 115650), TNFRSF16 (NGFR, CD271, NCBI Gene ID: 4804), TNFRSF17 (BCMA, CD269, NCBI Gene ID: 608), TNFRSF18 (GITR, CD357, NCBI Gene ID: 8784), TNFRSF19 (NCBI Gene ID: 55504), TNFRSF21 (CD358, DR6, NCBI Gene ID: 27242), and TNFRSF25 (DR3, NCBI Gene ID: 8718).

[0360] Example anti-TNFRSF4 (OX40) antibodies that can be co-administered include without limitation, MEDI6469, MEDI6383, MEDI0562 (tavolixizumab), MOXR0916, PF-04518600, RG-7888, GSK-3174998, INCAGN1949, BMS-986178, GBR-8383, ABBV-368, and those described in WO2016179517, WO2017096179, WO2017096182, WO2017096281, and WO2018089628.

[0361] Example anti-TNFRSF5 (CD40) antibodies that can be co-administered include without limitation RG7876, SEA-CD40, APX-005M and ABBV-428.

[0362] In some embodiments, the anti-TNFRSF7 (CD27) antibody varlilumab (CDX-1127) is co-administered.

[0363] Example anti-TNFRSF9 (4-1BB, CD137) antibodies that can be co-administered include without limitation urelumab, utomilumab (PF-05082566), AGEN2373 and ADG-106.

[0364] Example anti-TNFRSF18 (GITR) antibodies that can be co-administered include without limitation, MEDI1873, FPA-154, INCAGN-1876, TRX-518, BMS-986156, MK-1248, GWN-323, and those described in WO2017096179, WO2017096276, WO2017096189, and WO2018089628. In some embodiments, an antibody, or fragment thereof, co-targeting TNFRSF4 (OX40) and TNFRSF18 (GITR) is co-administered. Such antibodies are described, e.g., in WO2017096179 and WO2018089628.

### Bi- and Tri-Specific Natural Killer (NK)-Cell Engagers

[0365] In various embodiments, the one or more multi-specific antigen binding molecules described herein are combined or co-administered with a bi-specific NK-cell engager (BiKE) or a tri-specific NK-cell engager (TriKE) (e.g., not having an Fc) or bi-specific antibody (e.g., having an Fc) against an NK cell activating receptor, e.g., CD16A, C-type lectin receptors (CD94/NKG2C, NKG2D, NKG2E/H and NKG2F), natural cytotoxicity receptors (NKp30, NKp44 and NKp46), killer cell C-type lectin-like receptor (NKp65, NKp80), Fc receptor FcγR (which mediates antibody-dependent cell cytotoxicity), SLAM family receptors (e.g., 2B4, SLAM6 and SLAM7), killer cell immunoglobulin-like receptors (KIR) (KIR-2DS and KIR-3DS), DNAM-1 and CD137 (4-1BB). Illustrative anti-CD16 bi-specific antibodies, BiKEs or TriKEs that can be co-administered include AFM26 (BCMA/CD16A) and AFM-13 (CD16/CD30). As appropriate, the anti-CD16 binding bi-specific molecules may or may not have an Fc. BiKEs and TriKEs are described, e.g., in Felices, et al., Methods Mol Biol. (2016) 1441:333-346; Fang, et al., Semin Immunol. (2017) 31:37-54. Examples of a trispecific NK cell engager (TRiKE) include OXS-3550, HIV-TriKE, and CD16-IL-15-B7H3 TriKe.

### Phosphatidylinositol 3-Kinase (PI3K) Inhibitors

[0366] In certain embodiments, the one or more multi-specific antigen binding molecules described herein are combined or co-administered with an inhibitor of at least one of a phosphatidylinositol-4,5-bisphosphate 3-kinase catalytic subunit, e.g., phosphatidylinositol-4,5-bisphosphate 3-kinase catalytic subunit alpha (PIK3CA, CLAPO, CLOVE, CWS5, MCAP, MCM, MCMTC, PI3K, PI3K-alpha, p110-alpha; NCBI Gene ID: 5290); phosphatidylinositol-4,5-bisphosphate 3-kinase catalytic subunit beta (PIK3CB, P110BETA, PI3K, PI3KBETA, PIK3C1; NCBI Gene ID: 5291); phosphatidylinositol-4,5-bisphosphate 3-kinase catalytic subunit gamma (PIK3CG, PI3CG, PI3K, PI3Kgamma, PIK3, p110gamma, p120-PI3K; Gene ID: 5494); and phosphatidylinositol-4,5-bisphosphate 3-kinase catalytic subunit delta (PIK3CD, APDS, IMD14, P110DELTA, PI3K, p110D, NCBI Gene ID: 5293). In some embodiments, the PI3K inhibitor is a pan-PI3K inhibitor. Examples of PI3K inhibitors that can be combined or co-administered include without limitation, ACP-319, AEZA-129, AMG-319, AS252424, AZD8186, BAY 1082439, BEZ235, bimiralisib (PQR309), buparlisib (BKM120), BYL719 (alpelisib), carboxyamidotriazole orotate (CTO), CH5132799, CLR-457, CLR-1401, copanlisib (BAY 80-6946), DS-7423, duvelisib (IPI-145), fimepinostat (CUDC-907), gedatolisib (PF-05212384), GDC-0032, GDC-0084 (RG7666), GDC-0077, pictilisib (GDC-0941), GDC-0980, GSK2636771, GSK2269577, idelalisib (Zydelig®), INCB040093, INCB50465, IPI-443, IPI-549, KAR4141, LY294002, LY3023414, NERLYNX® (neratinib), nemiralisib (GSK2269557), omipalisib (GSK2126458, GSK458), OXY111A, panulisib (P7170, AK151761), PA799, perifosine (KRX-0401), Pilaralisib (SAR245408; XL147), puquitinib mesylate (XC-302), SAR260301, seletalisib (UCB-5857), serabelisib (INK-1117,MLN-1117,TAK-117), SF1126, sonolisib (PX-866), RG7604, rigosertib sodium (ON-01910 sodium), RP5090, tenalisib (RP6530), RV-1729, SRX3177, taselisib, TG100115, umbralisib (TGR-1202), TGX221, voxtalisib (SAR245409), VS-5584, WX-037, X-339, X-414, XL499, XL756, wortmannin, ZSTK474, and the compounds described in WO 2005/113556 (ICOS), WO 2013/052699 (Gilead Calistoga), WO 2013/116562 (Gilead Calistoga), WO 2014/100765 (Gilead Calistoga), WO 2014/100767 (Gilead Calistoga), and WO 2014/201409 (Gilead Sciences).

### Alpha-4/Beta-7 Antagonists

[0367] In certain embodiments, the one or more multi-specific antigen binding molecules described herein are combined or co-administered with an alpha-4/beta-7 antagonist. Examples of Integrin alpha-4/beta-7 antagonists include PTG-100, TRK-170, abrilumab, etrolizumab, carotegrast methyl, and vedolizumab.

### HPK1 Inhibitors

[0368] In certain embodiments, the one or more multi-specific antigen binding molecules described herein are combined or co-administered with an inhibitor of mitogen-activated protein kinase kinase kinase kinase 1 (MAP4K1; NCBI Gene ID: 11184; a.k.a., Hematopoietic Progenitor Kinase 1 (HPK1)). Examples of HPK1 inhibitors include, but are not limited to, ZYF-0272, and ZYF-0057.

### Pharmacokinetic Enhancers

[0369] In certain embodiments, the one or more multi-specific antigen binding molecules described herein are combined or co-administered with a pharmacokinetic enhancer. Examples of pharmacokinetic enhancers include cobicistat and ritonavir.

### Additional Therapeutic Agents

[0370] Examples of additional therapeutic agents include the compounds disclosed in WO 2004/096286 (Gilead Sciences); WO 2006/015261 (Gilead Sciences); WO 2006/110157 (Gilead Sciences); WO 2012/003497 (Gilead Sciences); WO 2012/003498 (Gilead Sciences); WO 2012/145728 (Gilead Sciences); WO 2013/006738 (Gilead Sciences); WO 2013/159064 (Gilead Sciences); WO 2014/100323 (Gilead Sciences), US 2013/0165489 (University of Pennsylvania), US 2014/0221378 (Japan Tobacco), US 2014/0221380 (Japan Tobacco); WO 2009/062285 (Boehringer Ingelheim); WO 2010/130034 (Boehringer Ingelheim); WO 2013/006792 (Pharma Resources), US 20140221356 (Gilead Sciences), US 20100143301 (Gilead Sciences) and WO 2013/091096 (Boehringer Ingelheim).

### Long-Acting HIV Inhibitors

[0371] In some embodiments, the one or more multi-specific antigen binding molecules described herein can be co-administered with a long-acting HIV inhibitor. Examples of drugs that are being developed as long acting HIV inhibitors include without limitation: cabotegravir LA, rilpivirine LA, any integrase LA, VM-1500 LAI, maraviroc (LAI), tenofovir implant, islatravir (MK-8591) implant, long-acting dolutegravir.

### HIV Vaccines

[0372] In certain embodiments, the one or more multi-specific antigen binding molecules described herein are combined or co-administered with an HIV vaccine. Examples of HIV vaccines that can be combined with an agent of this disclosure include peptide vaccines, recombinant subunit protein vaccines, live vector vaccines, DNA vaccines, HIV MAG DNA vaccine, CD4-derived peptide vaccines, vaccine combinations, adenoviral vector vaccines (an adenoviral vector such as Ad5, Ad26 or Ad35), simian adenovirus (chimpanzee, gorilla, rhesus, i.e., rhAd), adeno-associated virus vector vaccines, Chimpanzee adenoviral vaccines (e.g., ChAdOX1, ChAd68, ChAd3, ChAd63, ChAd83, ChAd155, ChAd157, Pan5, Pan6, Pan7, Pan9), Coxsackieviruses based vaccines, enteric virus based vaccines, Gorilla adenovirus vaccines, lentiviral vector based vaccine, arenavirus vaccines (such as LCMV, Pichinde), bi-segmented or tri-segmented arenavirus based vaccine, trimer-based HIV-1 vaccine, measles virus based vaccine, flavivirus vector based vaccines, tobacco mosaic virus vector based vaccine, Varicella-zoster virus based vaccine, Human parainfluenza virus 3 (PIV3) based vaccines, poxvirus based vaccine (modified vaccinia virus Ankara (MVA)), orthopoxvirus-derived NYVAC, and avipoxvirus-derived ALVAC (canarypox virus) strains); fowlpox virus based vaccine, rhabdovirus-based vaccines, such as VSV and marabavirus; recombinant human CMV (rhCMV) based vaccine, alphavirus-based vaccines, such as Semliki forest virus, Venezuelan equine encephalitis virus and sindbis virus (see, e.g., Lauer, et al., Clin Vaccine Immunol (2017) 24(1):e00298-16); LNP formulated mRNA based therapeutic vaccines; LNP-formulated self-replicating RNA/self-amplifying RNA vaccines.

[0373] Examples of vaccines include: AAVLP-HIV vaccine, anti-CD40.Env-gp140 vaccine, Ad4-EnvC150, BG505 SOSIP.664 gp140 adjuvanted vaccine, BG505 SOSIP.GT1.1 gp140 adjuvanted vaccine, ChAdOx1.tHIVconsv1 vaccine, CMV-MVA triplex vaccine, ChAdOx1.HTI, Chimigen HIV vaccine, ConM SOSIP.v7 gp140, rgp120 (AIDSVAX), ALVAC HIV (vCP1521)/AIDSVAX B/E (gp120) (RV144), monomeric gp120 HIV-1 subtype C vaccine, MPER-656 liposome subunit vaccine, Remune, ITV-1, Contre Vir, Ad5-ENVA-48, DCVax-001 (CDX-2401), Vacc-4x, Vacc-C5, VAC-3S, multiclade DNA recombinant adenovirus-5 (rAd5), rAd5 gag-pol env A/B/C vaccine, Pennvax-G, Pennvax-GP, Pennvax-G/MVA-CMDR, HIV-TriMix-mRNA vaccine, HIV-LAMP-vax, Ad35, Ad35-GRIN, NAcGM3/VSSP ISA-51, poly-ICLC adjuvanted vaccines, TatImmune, GTU-multiHIV (FIT-06), ChAdV63.HIVconsv, gp140[delta]V2.TV1+MF-59, rVSVIN HIV-1 gag vaccine, SeV-EnvF, SeV-Gag vaccine, AT-20, DNK-4, ad35-Grin/ENV, TBC-M4, HIVAX, HIVAX-2, N123-VRC-34.01 inducing epitope-based HIV vaccine, NYVAC-HIV-PT1, NYVAC-HIV-PT4, DNA-HIV-PT123, rAAV1-PG9DP, GOVX-B11, GOVX-B21, GOVX-C55, TVI-HIV-1, Ad-4 (Ad4-env Clade C+Ad4-mGag), Paxvax, EN41-UGR7C, EN41-FPA2, ENOB-HV-11, PreVaxTat, AE-H, MYM-V101, CombiHIVvac, ADVAX, MYM-V201, MVA-CMDR, MagaVax, DNA-Ad5 gag/pol/nef/nev (HVTN505), MVATG-17401, ETV-01, CDX-1401, DNA and Sev vectors vaccine expressing SCaVII, rcAD26.MOS1.HIV-Env, Ad26.Mod.HIV vaccine, Ad26.Mod.HIV+MVA mosaic vaccine+gp140, AGS-004, AVX-101, AVX-201, PEP-6409, SAV-001, ThV-01, TL-01, TUTI-16, VGX-3300, VIR-1111, IHV-001, and virus-like particle vaccines such as pseudovirion vaccine, CombiVICHvac, LFn-p24 B/C fusion vaccine, GTU-based DNA vaccine, HIV gag/pol/nef/env DNA vaccine, anti-TAT HIV vaccine, conjugate polypeptides vaccine, dendritic-cell vaccines (such as DermaVir), gag-based DNA vaccine, GI-2010, gp41 HIV-1 vaccine, HIV vaccine (PIKA adjuvant), i-key/MHC class II epitope hybrid peptide vaccines, ITV-2, ITV-3, ITV-4, LIPO-5, multiclade Env vaccine, MVA vaccine, Pennvax-GP, pp71-deficient HCMV vector HIV gag vaccine, rgp160 HIV vaccine, RNActive HIV vaccine, SCB-703, Tat Oyi vaccine, TBC-M4, UBI HIV gp120, Vacc-4x+romidepsin, variant gp120 polypeptide vaccine, rAd5 gag-pol env A/B/C vaccine, DNA.HTI and MVA.HTI, VRC-HIVDNA016-00-VP+VRC-HIVADV014-00-VP, INO-6145, JNJ-9220, gp145 C.6980; eOD-GT8 60mer based vaccine, PD-201401, env (A, B, C, A/E)/gag (C) DNA Vaccine, gp120 (A,B,C,A/E) protein vaccine, PDPHV-201401, Ad4-EnvCN54, EnvSeq-1 Envs HIV-1 vaccine (GLA-SE adjuvanted), HIV p24gag prime-boost plasmid DNA vaccine, HIV-1 iglb12 neutralizing VRC-01 antibody-stimulating anti-CD4 vaccine, arenavirus vector-based vaccines (Vaxwave, TheraT), MVA-BN HIV-1 vaccine regimen, UBI HIV gp120, mRNA based prophylactic vaccines, VPI-211, TBL-1203HI, CH505 TF chTrimer, CD40.HIVRI.Env vaccine, Drep-HIV-PT-1, mRNA-1644, and mRNA-1574.

### Birth Control (Contraceptive) Combination Therapy

[0374] In certain embodiments, the one or more multi-specific antigen binding molecules described herein are combined or co-administered with a birth control or contraceptive regimen. Therapeutic agents used for birth control (contraceptive) include cyproterone acetate, desogestrel, dienogest, drospirenone, estradiol valerate, ethinyl Estradiol, ethynodiol, etonogestrel, levomefolate, levonorgestrel, lynestrenol, medroxyprogesterone acetate, mestranol, mifepristone, misoprostol, nomegestrol acetate, norelgestromin, norethindrone, noretynodrel, norgestimate, ormeloxifene, segestersone acetate, ulipristal acetate, and any combinations thereof.

### Gene Therapy and Cell Therapy

[0375] In certain embodiments, the one or more multi-specific antigen binding molecules described herein are combined or co-administered with a gene or cell therapy regimen. Gene therapy and cell therapy include without limitation the genetic modification to silence a gene; genetic approaches to directly kill the infected cells; the infusion of immune cells designed to replace most of the patient's own immune system to enhance the immune response to infected cells, or activate the patient's own immune system to kill infected cells, or find and kill the infected cells; genetic approaches to modify cellular activity to further alter endogenous immune responsiveness against the infection. Examples of cell therapy include LB-1903, ENOB-HV-01, ENOB-HV-21, ENOB-HV-31, GOVX-B01, HSPCs overexpressing ALDH1 (LV-800, HIV infection), AGT103-T, and SupT1 cell-based therapy. Examples of dendritic cell therapy include AGS-004. CCR5 gene editing agents include SB-728T. CCR5 gene inhibitors include Cal-1, and lentivirus vector CCR5 shRNA/TRIM5alpha/TAR decoy-transduced autologous CD34-positive hematopoietic progenitor cells (HIV infection/HIV-related lymphoma). In some embodiments, C34-CCR5/C34-CXCR4 expressing CD4-positive T-cells are co-administered with one or more multi-specific antigen binding molecules. In some embodiments, the agents described herein are co-administered with AGT-103-transduced autologous T-cell therapy or AAV-eCD4-Ig gene therapy.

### Gene Editors

[0376] In certain embodiments, the one or more multi-specific antigen binding molecules described herein are combined or co-administered with a gene editor, e.g., an HIV targeted gene editor. In various embodiments, the genome editing system can be selected from the group consisting of: a CRISPR/Cas9 complex, a zinc finger nuclease complex, a TALEN complex, a homing endonucleases complex, and a meganuclease complex. An illustrative HIV targeting CRISPR/Cas9 system includes without limitation EBT-101.

### CAR-T-Cell Therapy

[0377] In some embodiments, the one or more multi-specific antigen binding molecules described herein can be co-administered with a population of immune effector cells engineered to express a chimeric antigen receptor (CAR), wherein the CAR comprises an HIV antigen binding domain. The HIV antigen includes an HIV envelope protein or a portion thereof, gp120 or a portion thereof, a CD4 binding site on gp120, the CD4-induced binding site on gp120, N glycan on gp120, the V2 of gp120, the membrane proximal region on gp41. The immune effector cell is a T-cell or an NK cell. In some embodiments, the T-cell is a CD4+ T-cell, a CD8+ T-cell, or a combination thereof. Cells can be autologous or allogeneic. Examples of HIV CAR-T include convertible CAR-T, VC-CAR-T, CMV-N6-CART, anti-CD4 CART-cell therapy, CD4 CAR+C34−CXCR4+CCR5 ZFN T-cells, dual anti-CD4 CART-T cell therapy (CD4 CAR+C34−CXCR4 T-cells), anti-CD4 MicAbody antibody+anti-MicAbody CAR T-cell therapy (iNKG2D CAR, HIV infection), GP-120 CAR-T therapy, autologous hematopoietic stem cells genetically engineered to express a CD4 CAR and the C46 peptide.

### TCR-T-Cell Therapy

[0378] In certain embodiments, the one or more multi-specific antigen binding molecules described herein are combined or co-administered with a population of TCR-T-cells. TCR-T-cells are engineered to target HIV derived peptides present on the surface of virus-infected cells, for example ImmTAV.

### B-Cell Therapy

[0379] In certain embodiments, the one or more multi-specific antigen binding molecules described herein are combined or co-administered with a population of B cells genetically modified to express broadly neutralizing antibodies, such as 3BNC117 (Hartweger, et al, J. Exp. Med. (2019) 1301, Moffett, et al., Sci. Immunol. 4, eaax0644 (2019) 17 May 2019).

### Illustrative Combination Therapies

[0380] In some embodiments, the one or more multi-specific antigen binding molecules described herein are combined or co-administered with one, two, three, four or more additional therapeutic agents selected from ATRIPLA® (efavirenz, tenofovir disoproxil fumarate, and emtricitabine); COMPLERA® (EVIPLERA®; rilpivirine, tenofovir disoproxil fumarate, and emtricitabine); STRIBILD® (elvitegravir, cobicistat, tenofovir disoproxil fumarate, and emtricitabine); TRUVADA® (tenofovir disoproxil fumarate and emtricitabine; TDF+FTC); DESCOVY® (tenofovir alafenamide and emtricitabine); ODEFSEY® (tenofovir alafenamide, emtricitabine, and rilpivirine); GENVOYA® (tenofovir alafenamide, emtricitabine, cobicistat, and elvitegravir); BIKTARVY® (bictegravir+emtricitabine+tenofovir alafenamide), adefovir; adefovir dipivoxil; cobicistat; emtricitabine; tenofovir; tenofovir alafenamide and elvitegravir; tenofovir alafenamide+elvitegravir (rectal formulation, HIV infection); tenofovir disoproxil; tenofovir disoproxil fumarate; tenofovir alafenamide; tenofovir alafenamide hemifumarate; TRIUMEQ® (dolutegravir, abacavir, and lamivudine); dolutegravir, abacavir sulfate, and lamivudine; raltegravir; PEGylated raltegravir; raltegravir and lamivudine; maraviroc; tenofovir+emtricitabine+maraviroc, enfuvirtide; ALUVIA® (KALETRA®; lopinavir and ritonavir); COMBIVIR® (zidovudine and lamivudine; AZT+3TC); EPZICOM® (LIVEXA®; abacavir sulfate and lamivudine; ABC+3TC); TRIZIVIR® (abacavir sulfate, zidovudine, and lamivudine; ABC+AZT+3TC); rilpivirine; rilpivirine hydrochloride; atazanavir sulfate and cobicistat; atazanavir and cobicistat; darunavir and cobicistat; atazanavir; atazanavir sulfate; dolutegravir; elvitegravir; ritonavir; atazanavir sulfate and ritonavir; darunavir; lamivudine; prolastin; fosamprenavir; fosamprenavir calcium efavirenz; etravirine; nelfinavir; nelfinavir mesylate; interferon; didanosine; stavudine; indinavir; indinavir sulfate; tenofovir and lamivudine; zidovudine; nevirapine; saquinavir; saquinavir mesylate; aldesleukin; zalcitabine; tipranavir; amprenavir; delavirdine; delavirdine mesylate; Radha-108 (receptol); lamivudine and tenofovir disoproxil fumarate; efavirenz, lamivudine, and tenofovir disoproxil fumarate; phosphazid; lamivudine, nevirapine, and zidovudine; abacavir; and abacavir sulfate.

[0381] In some embodiments, the one or more multi-specific antigen binding molecules described herein are combined or co-administered with an HIV nucleoside or nucleotide inhibitor of reverse transcriptase and an HIV non-nucleoside inhibitor of reverse transcriptase. In another specific embodiment, the one or more multi-specific antigen binding molecules described herein, or a pharmaceutical composition thereof, is combined or co-administered with an HIV nucleoside or nucleotide inhibitor of reverse transcriptase, and an HIV protease inhibiting compound. In an additional embodiment, the one or more multi-specific antigen binding molecules described herein, or a pharmaceutical composition thereof, is combined or co-administered with an HIV nucleoside or nucleotide inhibitor of reverse transcriptase, an HIV non-nucleoside inhibitor of reverse transcriptase, and a pharmacokinetic enhancer. In certain embodiments, the one or more multi-specific antigen binding molecules described herein, or a pharmaceutical composition thereof, is combined or co-administered with at least one HIV nucleoside inhibitor of reverse transcriptase, an integrase inhibitor, and a pharmacokinetic enhancer. In another embodiment, the one or more multi-specific antigen binding molecules described herein, or a pharmaceutical composition thereof, is combined or co-administered with two HIV nucleoside or nucleotide inhibitors of reverse transcriptase.

[0382] In some embodiments, the one or more multi-specific antigen binding molecules described herein are combined or co-administered with abacavir sulfate, tenofovir, tenofovir disoproxil, tenofovir disoproxil fumarate, tenofovir disoproxil hemifumarate, tenofovir alafenamide, or tenofovir alafenamide hemifumarate.

[0383] In some embodiments, the one or more multi-specific antigen binding molecules described herein are combined or co-administered with tenofovir, tenofovir disoproxil, tenofovir disoproxil fumarate, tenofovir alafenamide, or tenofovir alafenamide hemifumarate.

[0384] In some embodiments, the one or more multi-specific antigen binding molecules described herein are combined or co-administered with a first additional therapeutic agent selected from the group consisting of abacavir sulfate, tenofovir, tenofovir disoproxil, tenofovir disoproxil fumarate, tenofovir alafenamide, and tenofovir alafenamide hemifumarate, and a second additional therapeutic agent selected from the group consisting of emtricitabine and lamivudine.

[0385] In some embodiments, the one or more multi-specific antigen binding molecules described herein are combined or co-administered with a first additional therapeutic agent selected from the group consisting of tenofovir, tenofovir disoproxil, tenofovir disoproxil fumarate, tenofovir alafenamide, and tenofovir alafenamide hemifumarate, and a second additional therapeutic agent, wherein the second additional therapeutic agent is emtricitabine.

[0386] In some embodiments, the one or more multi-specific antigen binding molecules described herein are combined or co-administered with a first additional therapeutic agent selected from a first additional therapeutic agent selected from dolutegravir, cabotegravir, islatravir, darunavir, bictegravir, elsulfavirine, rilpivirine, and lenacapavir and a second additional therapeutic agent selected from emtricitabine and lamivudine.

[0387] In some embodiments, the one or more multi-specific antigen binding molecules described herein are combined or co-administered with a first additional therapeutic agent (a contraceptive) selected from the group consisting of cyproterone acetate, desogestrel, dienogest, drospirenone, estradiol valerate, ethinyl Estradiol, ethynodiol, etonogestrel, levomefolate, levonorgestrel, lynestrenol, medroxyprogesterone acetate, mestranol, mifepristone, misoprostol, nomegestrol acetate, norelgestromin, norethindrone, noretynodrel, norgestimate, ormeloxifene, segestersone acetate, ulipristal acetate, and any combinations thereof.

[0388] In certain embodiments, the one or more multi-specific antigen binding molecules described herein are combined or co-administered with one or more additional therapeutic agents in a therapeutically effective dosage in the amount in the range of e.g., in the range of 0.05 mg to 1000 mg per administration, e.g., from 0.05 mg to 150 mg per administration, e.g., from 0.05 mg to 0.35 mg per administration, e.g., from 25 mg to 50 mg per administration, e.g., from 30 mg to 35 mg per administration, e.g., from 10 mg to 1000 mg per administration, e.g., from 50 mg to 1000 mg per administration, e.g., from 100 mg to 700 mg per administration, e.g., at least 0.05 mg up to 0.1 mg, 0.2 mg, 0.3 mg, 0.35 mg, 0.4 mg, 0.5 mg, 0.6 mg, 0.7 mg, 0.8 mg, 1.0 mg, 5 mg, 10 mg, 25 mg, 30 mg, 35 mg, 40 mg, 45 mg, 50 mg, 60 mg, 70 mg, 80 mg, 90 mg, 100 mg, 200 mg, 300 mg, 400 mg, 500 mg, 600 mg, 700 mg, 800 mg, 900 mg, or 1000 mg per administration of the multi-specific antigen binding molecule. In certain embodiments, the one or more multi-specific antigen binding molecules described herein are combined or co-administered with one or more additional therapeutic agents, the multi-specific antigen binding molecule being administered in a therapeutically effective dosage amount, e.g., in the range of from 1 μg/kg to 5 μg/kg, e.g., from 350 μg/kg to 550 μg/kg, e.g., from 0.3 mg/kg to 30 mg/kg, e.g., from 2 mg/kg to 10 mg/kg, e.g., from 1 μg/kg up to 2 μg/kg, 3 μg/kg, 4 μg/kg, 5 μg/kg, 10 μg/kg, 50 μg/kg, 100 μg/kg, 250 μg/kg, 300 μg/kg, 350 μg/kg, 400 μg/kg, 410 μg/kg, 420 μg/kg, 430 μg/kg, 440 μg/kg, 450 μg/kg, 460 μg/kg, 470 μg/kg, 480 μg/kg, 490 μg/kg, 500 μg/kg, 750 μg/kg, 1 mg/kg, 1.5 mg/kg, 2 mg/kg, 2.5 mg/kg, 3 mg/kg, 3.5 mg/kg, 4 mg/kg, 4.5 mg/kg, 5 mg/kg, 6 mg/kg, 7 mg/kg, 8 mg/kg, 9 mg/kg, 10 mg/kg, 15 mg/kg, 20 mg/kg, 25 mg/kg, 30 mg/kg, 35 mg/kg, 40 mg/kg, 45 mg/kg, or 50 mg/kg, body weight per administration.

[0389] In certain embodiments, the one or more multi-specific antigen binding molecules described herein are combined or co-administered with 5-30 mg tenofovir alafenamide fumarate, tenofovir alafenamide hemifumarate, or tenofovir alafenamide, and 200 mg emtricitabine. In certain embodiments, the one or more multi-specific antigen binding molecules described herein are combined or co-administered with 5-10, 5-15, 5-20, 5-25, 25-30, 20-30, 15-30, or 10-30 mg tenofovir alafenamide fumarate, tenofovir alafenamide hemifumarate, or tenofovir alafenamide, and 200 mg emtricitabine. In certain embodiments, the one or more multi-specific antigen binding molecules described herein are combined or co-administered with 10 mg tenofovir alafenamide fumarate, tenofovir alafenamide hemifumarate, or tenofovir alafenamide, and 200 mg emtricitabine. In certain embodiments, the one or more multi-specific antigen binding molecules described herein are combined or co-administered with 25 mg tenofovir alafenamide fumarate, tenofovir alafenamide hemifumarate, or tenofovir alafenamide, and 200 mg emtricitabine. In some embodiments, the one or more multi-specific antigen binding molecules described herein are combined or co-administered with the agents provided herein in any dosage amount of the one or more multi-specific antigen binding molecules (e.g., from 1 mg to 500 mg of the one or more multi-specific antigen binding molecules, as described herein) the same as if each combination of dosages were specifically and individually listed.

[0390] In certain embodiments, the one or more multi-specific antigen binding molecules described herein are combined or co-administered with 200-400 mg tenofovir disoproxil fumarate, tenofovir disoproxil hemifumarate, or tenofovir disoproxil, and 200 mg emtricitabine. In certain embodiments, the one or more multi-specific antigen binding molecules described herein are combined or co-administered with 200-250, 200-300, 200-350, 250-350, 250-400, 350-400, 300-400, or 250-400 mg tenofovir disoproxil fumarate, tenofovir disoproxil hemifumarate, or tenofovir disoproxil, and 200 mg emtricitabine. In certain embodiments, the one or more multi-specific antigen binding molecules described herein are combined or co-administered with 300 mg tenofovir disoproxil fumarate, tenofovir disoproxil hemifumarate, or tenofovir disoproxil, and 200 mg emtricitabine. The one or more multi-specific antigen binding molecules may be combined with the agents provided herein in any dosage amount (e.g., from 1 mg to 500 mg of the one or more multi-specific antigen binding molecules) the same as if each combination of dosages were specifically and individually listed.

### 11. Pharmaceutical Compositions

[0391] Further provided are pharmaceutical compositions comprising one or more (e.g., one, two or three) multi-specific antigen binding molecules, as described herein, or one or more polynucleotide encoding one or more multi-specific antigen binding molecules, as described herein, and a pharmaceutically acceptable diluent, carrier or excipient. In certain embodiments, the pharmaceutical composition comprises a therapeutically effective amount of one or more unitary doses of one or more multi-specific antigen binding molecules, or one or more polynucleotides encoding the one or more multi-specific antigen binding molecules.

[0392] Various pharmaceutically acceptable diluents, carriers, and excipients, and techniques for the preparation and use of pharmaceutical compositions will be known to those of skill in the art in light of the present disclosure. Illustrative pharmaceutical compositions and pharmaceutically acceptable diluents, carriers, and excipients are also described, e.g., in Remington: The Science and Practice of Pharmacy 20th Ed. (Lippincott, Williams & Wilkins 2003); Loyd V. Allen Jr (Editor), “Remington: The Science and Practice of Pharmacy,” 22^{nd} Edition, 2012, Pharmaceutical Press; Brunton, Knollman and Hilal-Dandan, “Goodman and Gilman's The Pharmacological Basis of Therapeutics,” 13th Edition, 2017, McGraw-Hill Education/Medical; McNally and Hastedt (Editors), “Protein Formulation and Delivery, 2nd Edition, 2007, CRC Press; Banga, “Therapeutic Peptides and Proteins: Formulation, Processing, and Delivery Systems,” 3rd Edition, 2015, CRC Press; Lars Hovgaard, Frokjaer and van de Weert (Editors), “Pharmaceutical Formulation Development of Peptides and Proteins,” 2nd Edition, 2012, CRC Press; Carpenter and Manning (Editors), “Rational Design of Stable Protein Formulations: Theory and Practice,” 2002, Springer (Pharmaceutical Biotechnology (Book 13)); Meyer (Editor), “Therapeutic Protein Drug Products: Practical Approaches to Formulation in the Laboratory, Manufacturing, and the Clinic, 2012, Woodhead Publishing; and Shire, “Monoclonal Antibodies: Meeting the Challenges in Manufacturing, Formulation, Delivery and Stability of Final Drug Product, 2015, Woodhead Publishing.

[0393] In some embodiments, each carrier, diluent or excipient is “acceptable” in the sense of being compatible with the other ingredients of the pharmaceutical composition and not injurious to the subject. Often, the pharmaceutically acceptable carrier is an aqueous pH-buffered solution. Some examples of materials which can serve as pharmaceutically-acceptable carriers, diluents or excipients include: water; buffers, e.g., phosphate-buffered saline; sugars, such as lactose, trehalose, glucose and sucrose; starches, such as corn starch and potato starch; cellulose, and its derivatives, such as sodium carboxymethyl cellulose, ethyl cellulose and cellulose acetate; powdered tragacanth; malt; gelatin; talc; excipients, such as cocoa butter and suppository waxes; oils, such as peanut oil, cottonseed oil, safflower oil, sesame oil, olive oil, corn oil and soybean oil; glycols, such as propylene glycol; polyols, such as glycerin, sorbitol, mannitol and polyethylene glycol; esters, such as ethyl oleate and ethyl laurate; agar; buffering agents, such as magnesium hydroxide and aluminum hydroxide; alginic acid; pyrogen-free water; isotonic saline; Ringer's solution; ethyl alcohol; phosphate buffer solutions; 2-Amino-2-(hydroxymethyl)propane-1,3-diol (i.e., tris(hydroxymethyl)aminomethane; Tris) buffers, amino acids (e.g., charged amino acids, including without limitation, aspartate, asparagine, glutamate, glutamine, histidine, lysine, arginine); and other non-toxic compatible substances employed in pharmaceutical formulations. Wetting agents, emulsifiers and lubricants, such as sodium lauryl sulfate, a polysorbate (e.g., polysorbate 20, polysorbate 40, polysorbate 60, polysorbate 80) and magnesium stearate, as well as coloring agents, release agents, coating agents, sweetening, flavoring and perfuming agents, preservatives and antioxidants can also be present in the compositions. In one embodiment, the pharmaceutical composition comprises a physiologically acceptable buffer, pH 5.5 to 8.5, e.g., pH 5.5 to 6.5, sucrose, and polysorbate 80. In one embodiment, the pharmaceutical composition comprises histidine, sucrose, and polysorbate 80. In one embodiment, the pharmaceutical composition comprises sodium phosphate, sucrose, and polysorbate 80. In one embodiment, the pharmaceutical composition comprises a Tris buffer, sucrose, and polysorbate 80. In certain embodiments, pharmaceutical compositions are sterile. In certain embodiments, the pharmaceutical composition has a pH in the range of 4.5 to 8.5, 5.5 to 7.4, 4.5 to 6.5, 6.4 to 7.0, 6.5 to 8.5, 7.2 to 7.8, or a pH of 5.0, 5.5, 5.6, 5.7, 5.8, 5.9, 6.0, 6.5, 7.0, 7.5, 8.0 or 8.5. In one embodiment, the pharmaceutical composition has an osmolarity in the range of 240-260 or 250-330 mOsmol/L. In certain embodiments, the pharmaceutical composition is isotonic or near isotonic.

[0394] The formulation of and delivery methods of pharmaceutical compositions will generally be adapted according to the site and the disease to be treated. Exemplary formulations include, but are not limited to, those suitable for parenteral administration, e.g., intravenous, intra-arterial, intramuscular, or subcutaneous administration, including formulations encapsulated in micelles, liposomes or drug-release capsules (active agents incorporated within a biocompatible coating designed for slow-release); ingestible formulations; formulations for topical use, such as creams, ointments and gels; and other formulations such as inhalants, aerosols and sprays.

[0395] In some embodiments, the pharmaceutical compositions are formulated for parenteral, e.g., intravenous, subcutaneous, or intramuscular). In particular embodiments, for parenteral administration, the antibodies or antigen-binding fragments thereof are formulated in a unit dosage injectable form (solution, suspension, emulsion) in association with a pharmaceutically acceptable, parenteral vehicle. Examples of such vehicles include water, saline, Ringer's solution, dextrose solution, and 5% human serum albumin. Nonaqueous vehicles such as fixed oils and ethyl oleate may also be used. Liposomes may be used as carriers. The vehicle may contain minor amounts of additives such as substances that enhance isotonicity and chemical stability, e.g., buffers and preservatives. In certain embodiments, the multi-specific antigen binding molecules are formulated in such vehicles at concentrations of from 0.10 mg/ml to 150 mg/ml, e.g., from 0.11 mg/ml to 100 mg/ml, e.g., from 1 mg/ml to 100 mg/ml, e.g., from 5 mg/ml to 60 mg/ml, e.g., from 20 mg/ml to 150 mg/ml, e.g., from 10 mg/ml to 50 mg/ml, e.g., 5 mg/ml, 10 mg/ml, 15 mg/ml, 20 mg/ml, 25 mg/ml, 30 mg/ml, 35 mg/ml, 40 mg/ml, 45 mg/ml, 50 mg/ml, 60 mg/ml, 70 mg/ml, 80 mg/ml, 90 mg/ml, 100 mg/ml, 125 mg/ml or 150 mg/ml.

[0396] In some embodiments, the pharmaceutical composition comprises a multi-specific antigen binding molecule having a first antigen binding domain that binds to CD3, and a second antigen binding domain that binds to an epitope or region of gp120 in the CD4 binding site (CD4bs) and comprises one or more extracellular (EC) domains of CD4, and optionally, an IL-15 receptor agonist. In some embodiments, the one or more EC domains of CD4 comprise a sequence as set forth in SEQ ID NOs: 746-749, or a sequence that is at least 80%, at least 85%, at least 90%, at least 91%, at least 92%, at least 93%, at least 94%, at least 95%, at least 96%, at least 97%, at least 98%, or at least 99% identical to an amino acid sequence of SEQ ID NOs: 746-749 (e.g., SEQ ID NO:746). In some embodiments, the EC domain of CD4 comprises a sequence that is at least 80%, at least 85%, at least 90%, at least 91%, at least 92%, at least 93%, at least 94%, at least 95%, at least 96%, at least 97%, at least 98%, or at least 99% identical to the sequence of SEQ ID NO: 746. In some embodiments, the EC domain of CD4 comprises a sequence that is at least 95% identical to the sequence of SEQ ID NO: 746. In some embodiments, the EC domain of CD4 comprises a sequence that is at least 99% identical to the sequence of SEQ ID NO: 746. In some embodiments, the EC domain of CD4 comprises the sequence of SEQ ID NO: 746. In some embodiments, the first antigen binding domain comprises a first VH-CDR1, a first VH-CDR2, a first VH-CDR3, a first VL-CDR1, a first VL-CDR2 and a first VL-CDR3 comprising the following amino acid sequences, respectively (according to Kabat): SEQ ID NOs: 1, 11, 8, 4, 9 and 10; or SEQ ID NOs: 1, 12, 8, 4, 9 and 10; and the second antigen binding domain comprises one or more EC domains of CD4 comprising an amino acid sequence that comprises or is at least 80%, at least 85%, at least 90%, at least 91%, at least 92%, at least 93%, at least 94%, at least 95%, at least 96%, at least 97%, at least 98%, or at least 99%, identical to a CD4 EC domain selected from the group consisting of SEQ ID NOs: 746-749 (e.g., SEQ ID NO:746). In some embodiments, the first antigen binding domain comprises a first VH-CDR1, a first VH-CDR2, a first VH-CDR3, a first VL-CDR1, a first VL-CDR2 and a first VL-CDR3 comprising the following amino acid sequences, respectively (according to Kabat): SEQ ID NOs: 1, 12, 8, 4, 9 and 10; and the second antigen binding domain comprises one EC domain of CD4 comprising an amino acid sequence that is at least 80%, at least 85%, at least 90%, at least 91%, at least 92%, at least 93%, at least 94%, at least 95%, at least 96%, at least 97%, at least 98%, or at least 99%, identical to a CD4 EC domain of SEQ ID NO:746. In some embodiments, the first antigen binding domain comprises a first VH-CDR1, a first VH-CDR2, a first VH-CDR3, a first VL-CDR1, a first VL-CDR2 and a first VL-CDR3 comprising the following amino acid sequences, respectively (according to Kabat): SEQ ID NOs: 1, 12, 8, 4, 9 and 10; and the second antigen binding domain comprises one EC domain of CD4 comprising an amino acid sequence that is at least 95% identical to a CD4 EC domain of SEQ ID NO:746. In some embodiments, the first antigen binding domain comprises a first VH-CDR1, a first VH-CDR2, a first VH-CDR3, a first VL-CDR1, a first VL-CDR2 and a first VL-CDR3 comprising the following amino acid sequences, respectively (according to Kabat): SEQ ID NOs: 1, 12, 8, 4, 9 and 10; and the second antigen binding domain comprises one EC domain of CD4 comprising an amino acid sequence that is at least 99% identical to a CD4 EC domain of SEQ ID NO:746. In some embodiments, the first antigen binding domain comprises a first VH-CDR1, a first VH-CDR2, a first VH-CDR3, a first VL-CDR1, a first VL-CDR2 and a first VL-CDR3 comprising the following amino acid sequences, respectively (according to Kabat): SEQ ID NOs: 1, 12, 8, 4, 9 and 10; and the second antigen binding domain comprises one EC domain of CD4 comprising the amino acid sequence of SEQ ID NO:746. In some embodiments, the first antigen binding domain comprises a first VH-CDR1, a first VH-CDR2, a first VH-CDR3, a first VL-CDR1, a first VL-CDR2 and a first VL-CDR3 comprising the following amino acid sequences, respectively (according to Chothia): SEQ ID NOs: 17, 18, 23, 20, 24 and 25; and the second antigen binding domain comprises one or more EC domains of CD4 comprising an amino acid sequence that comprises or is at least 80%, at least 85%, at least 90%, at least 91%, at least 92%, at least 93%, at least 94%, at least 95%, at least 96%, at least 97%, at least 98%, or at least 99%, identical to a CD4 EC domain selected from the group consisting of SEQ ID NOs: 746-749 (e.g., SEQ ID NO:746). In some embodiments, the first antigen binding domain comprises a first VH-CDR1, a first VH-CDR2, a first VH-CDR3, a first VL-CDR1, a first VL-CDR2 and a first VL-CDR3 comprising the following amino acid sequences, respectively (according to Chothia): SEQ ID NOs: 17, 18, 23, 20, 24 and 25; and the second antigen binding domain comprises one EC domain of CD4 comprising an amino acid sequence is at least 95% (e.g., at least 99%) identical to a CD4 EC domain of SEQ ID NO:746. In some embodiments, the first antigen binding domain comprises a first VH-CDR1, a first VH-CDR2, a first VH-CDR3, a first VL-CDR1, a first VL-CDR2 and a first VL-CDR3 comprising the following amino acid sequences, respectively (according to Chothia): SEQ ID NOs: 17, 18, 23, 20, 24 and 25; and the second antigen binding domain comprises one EC domain of CD4 comprising the amino acid sequence of SEQ ID NO:746. In some embodiments, the first antigen binding domain comprises a first VH-CDR1, a first VH-CDR2, a first VH-CDR3, a first VL-CDR1, a first VL-CDR2 and a first VL-CDR3 comprising the following amino acid sequences, respectively (according to IMGT): SEQ ID NOs: 28, 29, 32, 31, 24 and 10; and the second antigen binding domain comprises one or more EC domains of CD4 comprising an amino acid sequence that comprises or is at least 80%, at least 85%, at least 90%, at least 91%, at least 92%, at least 93%, at least 94%, at least 95%, at least 96%, at least 97%, at least 98%, or at least 99%, identical to a CD4 EC domain selected from the group consisting of SEQ ID NOs: 746-749 (e.g., SEQ ID NO:746). In some embodiments, the first antigen binding domain comprises a first VH-CDR1, a first VH-CDR2, a first VH-CDR3, a first VL-CDR1, a first VL-CDR2 and a first VL-CDR3 comprising the following amino acid sequences, respectively (according to IMGT): SEQ ID NOs: 28, 29, 32, 31, 24 and 10; and the second antigen binding domain comprises one EC domain of CD4 comprising an amino acid sequence is at least 95% (e.g., at least 99%) identical to a CD4 EC domain of SEQ ID NO:746. In some embodiments, the first antigen binding domain comprises a first VH-CDR1, a first VH-CDR2, a first VH-CDR3, a first VL-CDR1, a first VL-CDR2 and a first VL-CDR3 comprising the following amino acid sequences, respectively (according to IMGT): SEQ ID NOs: 28, 29, 32, 31, 24 and 10; and the second antigen binding domain comprises one EC domain of CD4 comprising the amino acid sequence of SEQ ID NO:746. In some embodiments, the first antigen binding domain comprises a first VH-CDR1, a first VH-CDR2, a first VH-CDR3, a first VL-CDR1, a first VL-CDR2 and a first VL-CDR3 comprising the following amino acid sequences, respectively (according to Honegger): SEQ ID NOs: 34, 42, 40, 37, 41 and 25; or SEQ ID NOs: 34, 43, 40, 37, 41 and 25; and the second antigen binding domain comprises one or more EC domains of CD4 comprising an amino acid sequence that comprises or is at least 80%, at least 85%, at least 90%, at least 91%, at least 92%, at least 93%, at least 94%, at least 95%, at least 96%, at least 97%, at least 98%, or at least 99%, identical to a CD4 EC domain selected from the group consisting of SEQ ID NOs: 746-749 (e.g., SEQ ID NO:746). In some embodiments, the first antigen binding domain comprises a first VH-CDR1, a first VH-CDR2, a first VH-CDR3, a first VL-CDR1, a first VL-CDR2 and a first VL-CDR3 comprising the following amino acid sequences, respectively (according to Honegger): SEQ ID NOs: 34, 43, 40, 37, 41 and 25; and the second antigen binding domain comprises one EC domain of CD4 comprising an amino acid sequence that comprises or is at least 80%, at least 85%, at least 90%, at least 91%, at least 92%, at least 93%, at least 94%, at least 95%, at least 96%, at least 97%, at least 98%, or at least 99%, identical to a CD4 EC domain of SEQ ID NO:746. In some embodiments, the first antigen binding domain comprises a first VH-CDR1, a first VH-CDR2, a first VH-CDR3, a first VL-CDR1, a first VL-CDR2 and a first VL-CDR3 comprising the following amino acid sequences, respectively (according to Honegger): SEQ ID NOs: 34, 43, 40, 37, 41 and 25; and the second antigen binding domain comprises one EC domain of CD4 comprising an amino acid sequence is at least 95% (e.g., at least 99%) identical to a CD4 EC domain of SEQ ID NO:746. In some embodiments, the first antigen binding domain comprises a first VH-CDR1, a first VH-CDR2, a first VH-CDR3, a first VL-CDR1, a first VL-CDR2 and a first VL-CDR3 comprising the following amino acid sequences, respectively (according to Honegger): SEQ ID NOs: 34, 43, 40, 37, 41 and 25; and the second antigen binding domain comprises one EC domain of CD4 comprising the amino acid sequence of SEQ ID NO:746. In some embodiments, the first antigen binding domain comprises a first VH and a first VL comprising the amino acid sequences set forth, respectively, or comprising amino acid sequences that are at least 80%, at least 85%, at least 90%, at least 91%, at least 92%, at least 93%, at least 94%, at least 95%, at least 96%, at least 97%, at least 98%, or at least 99% identical to the amino acid sequences set forth, respectively: SEQ ID NOs: 49 and 55; SEQ ID NOs: 50 and 55; SEQ ID NOs: 50 and 56; SEQ ID NOs: 51 and 55; or SEQ ID NOs: 51 and 56; and the second antigen binding domain comprises one or more EC domains of CD4 comprising an amino acid sequence that comprises or is at least 80%, at least 85%, at least 90%, at least 91%, at least 92%, at least 93%, at least 94%, at least 95%, at least 96%, at least 97%, at least 98%, or at least 99%, identical to a CD4 EC domain selected from the group consisting of SEQ ID NOs: 746-749 (e.g., SEQ ID NO:746). In some embodiments, the first antigen binding domain comprises a first VH and a first VL comprising amino acid sequences that are at least 80%, at least 85%, at least 90%, at least 91%, at least 92%, at least 93%, at least 94%, at least 95%, at least 96%, at least 97%, at least 98%, or at least 99% identical to the amino acid sequences set forth, respectively: SEQ ID NOs: 51 and 56; and the second antigen binding domain comprises one EC domain of CD4 comprising an amino acid sequence that is at least 80%, at least 85%, at least 90%, at least 91%, at least 92%, at least 93%, at least 94%, at least 95%, at least 96%, at least 97%, at least 98%, or at least 99%, identical to a CD4 EC domain of SEQ ID NO:746. In some embodiments, the first antigen binding domain comprises a first VH and a first VL comprising amino acid sequences that are at least 95% identical to the amino acid sequences set forth, respectively: SEQ ID NOs: 51 and 56; and the second antigen binding domain comprises one EC domain of CD4 comprising an amino acid sequence that is at least 95% identical to a CD4 EC domain of SEQ ID NO:746. In some embodiments, the first antigen binding domain comprises a first VH and a first VL comprising amino acid sequences that are at least 95% identical to the amino acid sequences set forth, respectively: SEQ ID NOs: 51 and 56; and the second antigen binding domain comprises one EC domain of CD4 comprising an amino acid sequence that is at least 99% identical to a CD4 EC domain of SEQ ID NO:746. In some embodiments, the first antigen binding domain comprises a first VH and a first VL comprising amino acid sequences that are at least 95% identical to the amino acid sequences set forth, respectively: SEQ ID NOs: 51 and 56; and the second antigen binding domain comprises one EC domain of CD4 comprising an amino acid sequence of SEQ ID NO:746. In some embodiments, the first antigen binding domain comprises a first VH and a first VL comprising amino acid sequences that are at least 99% identical to the amino acid sequences set forth, respectively: SEQ ID NOs: 51 and 56; and the second antigen binding domain comprises one EC domain of CD4 comprising an amino acid sequence that is at least 95% identical to a CD4 EC domain of SEQ ID NO:746. In some embodiments, the first antigen binding domain comprises a first VH and a first VL comprising the amino acid sequences set forth, respectively: SEQ ID NOs: 51 and 56; and the second antigen binding domain comprises one EC domain of CD4 comprising an amino acid sequence that is at least 99% identical to a CD4 EC domain of SEQ ID NO:746. In some embodiments, the first antigen binding domain comprises a first VH and a first VL comprising amino acid sequences that are at least 99% identical to the amino acid sequences set forth, respectively: SEQ ID NOs: 51 and 56; and the second antigen binding domain comprises one EC domain of CD4 comprising an amino acid sequence that is at least 99% identical to a CD4 EC domain of SEQ ID NO:746. In some embodiments, the first antigen binding domain comprises a first VH comprising the amino acid sequence of SEQ ID NO: 51 and a first VL comprising an amino acid sequence that is at least 95% identical to the amino acid sequence of SEQ ID NO: 56; and the second antigen binding domain comprises one EC domain of CD4 comprising an amino acid sequence that is at least 95% identical to a CD4 EC domain of SEQ ID NO:746. In some embodiments, the first antigen binding domain comprises a first VH comprising the amino acid sequence of SEQ ID NO: 51 and a first VL comprising an amino acid sequence that is at least 95% identical to the amino acid sequence of SEQ ID NO: 56; and the second antigen binding domain comprises one EC domain of CD4 comprising an amino acid sequence that is at least 99% identical to a CD4 EC domain of SEQ ID NO:746. In some embodiments, the first antigen binding domain comprises a first VH comprising the amino acid sequence of SEQ ID NO: 51 and a first VL comprising an amino acid sequence that is at least 99% identical to the amino acid sequence of SEQ ID NO: 56; and the second antigen binding domain comprises one EC domain of CD4 comprising an amino acid sequence that is at least 95% identical to a CD4 EC domain of SEQ ID NO:746. In some embodiments, the first antigen binding domain comprises a first VH comprising the amino acid sequence of SEQ ID NO: 51 and a first VL comprising an amino acid sequence that is at least 99% identical to the amino acid sequence of SEQ ID NO: 56; and the second antigen binding domain comprises one EC domain of CD4 comprising an amino acid sequence that is at least 99% identical to a CD4 EC domain of SEQ ID NO:746. In some embodiments, the first antigen binding domain comprises a first VH comprising an amino acid sequence that is at least 95% identical to the amino acid sequence of SEQ ID NO: 51 and a first VL comprising the amino acid sequence of SEQ ID NO: 56; and the second antigen binding domain comprises one EC domain of CD4 comprising an amino acid sequence that is at least 95% identical to a CD4 EC domain of SEQ ID NO:746. In some embodiments, the first antigen binding domain comprises a first VH comprising an amino acid sequence that is at least 95% identical to the amino acid sequence of SEQ ID NO: 51 and a first VL comprising the amino acid sequence of SEQ ID NO: 56; and the second antigen binding domain comprises one EC domain of CD4 comprising an amino acid sequence that is at least 99% identical to a CD4 EC domain of SEQ ID NO:746. In some embodiments, the first antigen binding domain comprises a first VH comprising an amino acid sequence that is at least 99% identical to the amino acid sequence of SEQ ID NO: 51 and a first VL comprising the amino acid sequence of SEQ ID NO: 56; and the second antigen binding domain comprises one EC domain of CD4 comprising an amino acid sequence that is at least 95% identical to a CD4 EC domain of SEQ ID NO:746. In some embodiments, the first antigen binding domain comprises a first VH comprising an amino acid sequence that is at least 99% identical to the amino acid sequence of SEQ ID NO: 51 and a first VL comprising the amino acid sequence of SEQ ID NO: 56; and the second antigen binding domain comprises one EC domain of CD4 comprising an amino acid sequence that is at least 99% identical to a CD4 EC domain of SEQ ID NO:746. In some embodiments, the first antigen binding domain comprises a first VH and a first VL comprising the amino acid sequences set forth, respectively: SEQ ID NOs: 51 and 56; and the second antigen binding domain comprises one EC domain of CD4 comprising an amino acid sequence of SEQ ID NO:746.

[0397] In some embodiments, the pharmaceutical composition comprises first and second antigen binding molecules. In some embodiments, the first multi-specific antigen binding molecule competes with or comprises VH and VL regions from an antibody selected from the group consisting of GS-9722 (elipovimab), GS-2872, PGT-121, PGT-121.66, PGT-121.414, PGT-122, PGT-123, PGT-124, PGT-125, PGT-126, PGT-128, PGT-130, PGT-133, PGT-134, PGT-135, PGT-136, PGT-137, PGT-138, PGT-139, 10-1074, 10-1074-J, VRC24, 2G12, BG18, 354BG8, 354BG18, 354BG42, 354BG33, 354BG129, 354BG188, 354BG411, 354BG426, DH270.1, DH270.6, PGDM12, VRC41.01, PGDM21, PCDN-33A, BF520.1 and VRC29.03, and the second antigen binding molecule or antibody or fragment thereof, competes with or comprises VH and VL regions from an antibody selected from the group consisting of 3BNC117, GS-9723, GS-5423, 3BNC60, b12, F105, VRC01, VRC07, VRC07-523, VRC03, VRC06, VRC06b01 VRC08, VRC0801, NIH45-46, PGV04 (a.k.a., VRC-PG04); CH103, 44-VRC13.01, 1NC9, 12A12, N6, 1-18, N49-P7, NC-Cow1, IOMA, CH235 and CH235.12, N49P6, N49P7, N49P11, N49P9 and N60P25. In some embodiments, the first multi-specific antigen binding molecule competes with or comprises VH and VL regions from an antibody selected from the group consisting of GS-9722 (elipovimab), GS-2872, PGT-121, PGT121.414, 10-1074, 10-1074-J and PGT-134, and the second antigen binding molecule or antibody or antigen binding fragment thereof competes with or comprises VH and VL regions from 3BNC117, GS-9723, VRC07 or VRC07-523.

[0398] In some embodiments, the first multi-specific antigen binding molecule competes with or comprises VH and VL regions from an antibody selected from the group consisting of 3BNC117, GS-9723, GS-5423, 3BNC60, b12, F105, VRC01, VRC07, VRC07-523, VRC03, VRC06, VRC06b01 VRC08, VRC0801, NIH45-46, PGV04 (a.k.a., VRC-PG04); CH103, 44-VRC13.01, 1NC9, 12A12, N6, 1-18, N49-P7, NC-Cow1, IOMA, CH235 and CH235.12, N49P6, N49P7, N49P11, N49P9 and N60P25, and the second antigen binding molecule or antibody or fragment thereof, competes with or comprises VH and VL regions from an antibody selected from the group consisting of GS-9722 (elipovimab), GS-2872, PGT-121, PGT-121.66, PGT-121.414, PGT-122, PGT-123, PGT-124, PGT-125, PGT-126, PGT-128, PGT-130, PGT-133, PGT-134, PGT-135, PGT-136, PGT-137, PGT-138, PGT-139, 10-1074, 10-1074-J, VRC24, 2G12, BG18, 354BG8, 354BG18, 354BG42, 354BG33, 354BG129, 354BG188, 354BG411, 354BG426, DH270.1, DH270.6, PGDM12, VRC41.01, PGDM21, PCDN-33A, BF520.1 and VRC29.03. In some embodiments, the first multi-specific antigen binding molecule competes with or comprises VH and VL regions from an antibody selected from the group consisting of 3BNC117, GS-9723, VRC07 or VRC07-523, and the second antigen binding molecule or antibody or antigen binding fragment thereof competes with or comprises VH and VL regions from GS-9722 (elipovimab), GS-2872, PGT-121, PGT121.414, 10-1074, 10-1074-J and PGT-134.

[0399] In some embodiments, the first multi-specific antigen binding molecule competes with or comprises VH and VL regions from an antibody selected from the group consisting of GS-9722 (elipovimab), GS-2872, PGT-121, PGT121.414, 10-1074, 10-1074-J and PGT-134, and the second antigen binding molecule comprises a soluble extracellular region of CD4 (e.g., domain 1 (D1), D1-D2, D1-D3, D1-D4). In some embodiments, the first multi-specific antigen binding molecule comprises a soluble extracellular region of CD4 (e.g., domain 1 (D1), D1-D2, D1-D3, D1-D4), and the second antigen binding molecule or antibody or fragment thereof, competes with or comprises VH and VL regions from an antibody selected from the group consisting of GS-9722 (elipovimab), GS-2872, PGT-121, PGT-121.66, PGT-121.414, PGT-122, PGT-123, PGT-124, PGT-125, PGT-126, PGT-128, PGT-130, PGT-133, PGT-134, PGT-135, PGT-136, PGT-137, PGT-138, PGT-139, 10-1074, 10-1074-J, VRC24, 2G12, BG18, 354BG8, 354BG18, 354BG42, 354BG33, 354BG129, 354BG188, 354BG411, 354BG426, DH270.1, DH270.6, PGDM12, VRC41.01, PGDM21, PCDN-33A, BF520.1 and VRC29.03. In some embodiments, the first multi-specific antigen binding molecule comprises a soluble extracellular region of CD4 (e.g., domain 1 (D1), D1-D2, D1-D3, D1-D4), and the second antigen binding molecule or antibody or antigen binding fragment thereof competes with or comprises VH and VL regions from GS-9722 (elipovimab), GS-2872, PGT-121, PGT121.414, 10-1074, 10-1074-J and PGT-134.

[0400] In some embodiments, the pharmaceutical composition comprises first, second and third antigen binding molecules. In some embodiments, the pharmaceutical composition comprises a first multi-specific antigen binding molecule and second and third multi-specific antigen binding molecules or antibodies or fragments thereof. In some embodiments, the first multi-specific antigen binding molecule comprises a soluble extracellular region of CD4 (e.g., domain 1 (D1), D1-D2, D1-D3, D1-D4); the second antigen binding molecule or antibody or fragment thereof, competes with or comprises VH and VL regions from an antibody selected from the group consisting of GS-9722 (elipovimab), GS-2872, PGT-121, PGT-121.66, PGT-121.414, PGT-122, PGT-123, PGT-124, PGT-125, PGT-126, PGT-128, PGT-130, PGT-133, PGT-134, PGT-135, PGT-136, PGT-137, PGT-138, PGT-139, 10-1074, 10-1074-J, VRC24, 2G12, BG18, 354BG8, 354BG18, 354BG42, 354BG33, 354BG129, 354BG188, 354BG411, 354BG426, DH270.1, DH270.6, PGDM12, VRC41.01, PGDM21, PCDN-33A, BF520.1 and VRC29.03; and the third multi-specific antigen binding molecule or antibody or fragment thereof, competes with or comprises VH and VL regions from an antibody selected from the group consisting of 3BNC117, GS-9723, GS-5423, 3BNC60, b12, F105, VRC01, VRC07, VRC07-523, VRC03, VRC06, VRC06b01 VRC08, VRC0801, NIH45-46, PGV04 (a.k.a., VRC-PG04); CH103, 44-VRC13.01, 1NC9, 12A12, N6, 1-18, N49-P7, NC-Cow1, IOMA, CH235 and CH235.12, N49P6, N49P7, N49P11, N49P9 and N60P25. In some embodiments, the first multi-specific antigen binding molecule comprises a soluble extracellular region of CD4 (e.g., domain 1 (D1), D1-D2, D1-D3, D1-D4); the second antigen binding molecule or antibody or fragment thereof, competes with or comprises VH and VL regions from an antibody selected from the group consisting of GS-9722 (elipovimab), GS-2872, PGT-121, PGT121.414, 10-1074, 10-1074-J and PGT-134; and the third multi-specific antigen binding molecule or antibody or antigen binding fragment thereof competes with or comprises VH and VL regions from 3BNC117, GS-9723, VRC07 or VRC07-523.

### 12. Kits

[0401] Further provided are kits comprising one or more of the multi-specific antigen binding molecules described herein, including polynucleotides, pharmaceutical compositions and conjugates thereof.

[0402] In some embodiments, the kit comprises a multi-specific antigen binding molecule having a first antigen binding domain that binds to CD3, and a second antigen binding domain that binds to an epitope or region of gp120 in the CD4 binding site (CD4bs) and comprises one or more extracellular (EC) domains of CD4, and optionally, an IL-15 receptor agonist. In some embodiments, the one or more EC domains of CD4 comprise a sequence as set forth in SEQ ID NOs: 746-749, or a sequence that is at least 80%, at least 85%, at least 90%, at least 91%, at least 92%, at least 93%, at least 94%, at least 95%, at least 96%, at least 97%, at least 98%, or at least 99% identical to an amino acid sequence of SEQ ID NOs: 746-749 (e.g., SEQ ID NO:746). In some embodiments, the EC domain of CD4 comprises a sequence that is at least 80%, at least 85%, at least 90%, at least 91%, at least 92%, at least 93%, at least 94%, at least 95%, at least 96%, at least 97%, at least 98%, or at least 99% identical to the sequence of SEQ ID NO: 746. In some embodiments, the EC domain of CD4 comprises a sequence that is at least 95% identical to the sequence of SEQ ID NO: 746. In some embodiments, the EC domain of CD4 comprises a sequence that is at least 99% identical to the sequence of SEQ ID NO: 746. In some embodiments, the EC domain of CD4 comprises the sequence of SEQ ID NO: 746. In some embodiments, the first antigen binding domain comprises a first VH-CDR1, a first VH-CDR2, a first VH-CDR3, a first VL-CDR1, a first VL-CDR2 and a first VL-CDR3 comprising the following amino acid sequences, respectively (according to Kabat): SEQ ID NOs: 1, 11, 8, 4, 9 and 10; or SEQ ID NOs: 1, 12, 8, 4, 9 and 10; and the second antigen binding domain comprises one or more EC domains of CD4 comprising an amino acid sequence that comprises or is at least 80%, at least 85%, at least 90%, at least 91%, at least 92%, at least 93%, at least 94%, at least 95%, at least 96%, at least 97%, at least 98%, or at least 99%, identical to a CD4 EC domain selected from the group consisting of SEQ ID NOs: 746-749 (e.g., SEQ ID NO:746). In some embodiments, the first antigen binding domain comprises a first VH-CDR1, a first VH-CDR2, a first VH-CDR3, a first VL-CDR1, a first VL-CDR2 and a first VL-CDR3 comprising the following amino acid sequences, respectively (according to Kabat): SEQ ID NOs: 1, 12, 8, 4, 9 and 10; and the second antigen binding domain comprises one EC domain of CD4 comprising an amino acid sequence that is at least 80%, at least 85%, at least 90%, at least 91%, at least 92%, at least 93%, at least 94%, at least 95%, at least 96%, at least 97%, at least 98%, or at least 99%, identical to a CD4 EC domain of SEQ ID NO:746. In some embodiments, the first antigen binding domain comprises a first VH-CDR1, a first VH-CDR2, a first VH-CDR3, a first VL-CDR1, a first VL-CDR2 and a first VL-CDR3 comprising the following amino acid sequences, respectively (according to Kabat): SEQ ID NOs: 1, 12, 8, 4, 9 and 10; and the second antigen binding domain comprises one EC domain of CD4 comprising an amino acid sequence that is at least 95% identical to a CD4 EC domain of SEQ ID NO:746. In some embodiments, the first antigen binding domain comprises a first VH-CDR1, a first VH-CDR2, a first VH-CDR3, a first VL-CDR1, a first VL-CDR2 and a first VL-CDR3 comprising the following amino acid sequences, respectively (according to Kabat): SEQ ID NOs: 1, 12, 8, 4, 9 and 10; and the second antigen binding domain comprises one EC domain of CD4 comprising an amino acid sequence that is at least 99% identical to a CD4 EC domain of SEQ ID NO:746. In some embodiments, the first antigen binding domain comprises a first VH-CDR1, a first VH-CDR2, a first VH-CDR3, a first VL-CDR1, a first VL-CDR2 and a first VL-CDR3 comprising the following amino acid sequences, respectively (according to Kabat): SEQ ID NOs: 1, 12, 8, 4, 9 and 10; and the second antigen binding domain comprises one EC domain of CD4 comprising the amino acid sequence of SEQ ID NO:746. In some embodiments, the first antigen binding domain comprises a first VH-CDR1, a first VH-CDR2, a first VH-CDR3, a first VL-CDR1, a first VL-CDR2 and a first VL-CDR3 comprising the following amino acid sequences, respectively (according to Chothia): SEQ ID NOs: 17, 18, 23, 20, 24 and 25; and the second antigen binding domain comprises one or more EC domains of CD4 comprising an amino acid sequence that comprises or is at least 80%, at least 85%, at least 90%, at least 91%, at least 92%, at least 93%, at least 94%, at least 95%, at least 96%, at least 97%, at least 98%, or at least 99%, identical to a CD4 EC domain selected from the group consisting of SEQ ID NOs: 746-749 (e.g., SEQ ID NO:746). In some embodiments, the first antigen binding domain comprises a first VH-CDR1, a first VH-CDR2, a first VH-CDR3, a first VL-CDR1, a first VL-CDR2 and a first VL-CDR3 comprising the following amino acid sequences, respectively (according to Chothia): SEQ ID NOs: 17, 18, 23, 20, 24 and 25; and the second antigen binding domain comprises one EC domain of CD4 comprising an amino acid sequence is at least 95% (e.g., at least 99%) identical to a CD4 EC domain of SEQ ID NO:746. In some embodiments, the first antigen binding domain comprises a first VH-CDR1, a first VH-CDR2, a first VH-CDR3, a first VL-CDR1, a first VL-CDR2 and a first VL-CDR3 comprising the following amino acid sequences, respectively (according to Chothia): SEQ ID NOs: 17, 18, 23, 20, 24 and 25; and the second antigen binding domain comprises one EC domain of CD4 comprising the amino acid sequence of SEQ ID NO:746. In some embodiments, the first antigen binding domain comprises a first VH-CDR1, a first VH-CDR2, a first VH-CDR3, a first VL-CDR1, a first VL-CDR2 and a first VL-CDR3 comprising the following amino acid sequences, respectively (according to IMGT): SEQ ID NOs: 28, 29, 32, 31, 24 and 10; and the second antigen binding domain comprises one or more EC domains of CD4 comprising an amino acid sequence that comprises or is at least 80%, at least 85%, at least 90%, at least 91%, at least 92%, at least 93%, at least 94%, at least 95%, at least 96%, at least 97%, at least 98%, or at least 99%, identical to a CD4 EC domain selected from the group consisting of SEQ ID NOs: 746-749 (e.g., SEQ ID NO:746). In some embodiments, the first antigen binding domain comprises a first VH-CDR1, a first VH-CDR2, a first VH-CDR3, a first VL-CDR1, a first VL-CDR2 and a first VL-CDR3 comprising the following amino acid sequences, respectively (according to IMGT): SEQ ID NOs: 28, 29, 32, 31, 24 and 10; and the second antigen binding domain comprises one EC domain of CD4 comprising an amino acid sequence is at least 95% (e.g., at least 99%) identical to a CD4 EC domain of SEQ ID NO:746. In some embodiments, the first antigen binding domain comprises a first VH-CDR1, a first VH-CDR2, a first VH-CDR3, a first VL-CDR1, a first VL-CDR2 and a first VL-CDR3 comprising the following amino acid sequences, respectively (according to IMGT): SEQ ID NOs: 28, 29, 32, 31, 24 and 10; and the second antigen binding domain comprises one EC domain of CD4 comprising the amino acid sequence of SEQ ID NO:746. In some embodiments, the first antigen binding domain comprises a first VH-CDR1, a first VH-CDR2, a first VH-CDR3, a first VL-CDR1, a first VL-CDR2 and a first VL-CDR3 comprising the following amino acid sequences, respectively (according to Honegger): SEQ ID NOs: 34, 42, 40, 37, 41 and 25; or SEQ ID NOs: 34, 43, 40, 37, 41 and 25; and the second antigen binding domain comprises one or more EC domains of CD4 comprising an amino acid sequence that comprises or is at least 80%, at least 85%, at least 90%, at least 91%, at least 92%, at least 93%, at least 94%, at least 95%, at least 96%, at least 97%, at least 98%, or at least 99%, identical to a CD4 EC domain selected from the group consisting of SEQ ID NOs: 746-749 (e.g., SEQ ID NO:746). In some embodiments, the first antigen binding domain comprises a first VH-CDR1, a first VH-CDR2, a first VH-CDR3, a first VL-CDR1, a first VL-CDR2 and a first VL-CDR3 comprising the following amino acid sequences, respectively (according to Honegger): SEQ ID NOs: 34, 43, 40, 37, 41 and 25; and the second antigen binding domain comprises one EC domain of CD4 comprising an amino acid sequence that comprises or is at least 80%, at least 85%, at least 90%, at least 91%, at least 92%, at least 93%, at least 94%, at least 95%, at least 96%, at least 97%, at least 98%, or at least 99%, identical to a CD4 EC domain of SEQ ID NO:746. In some embodiments, the first antigen binding domain comprises a first VH-CDR1, a first VH-CDR2, a first VH-CDR3, a first VL-CDR1, a first VL-CDR2 and a first VL-CDR3 comprising the following amino acid sequences, respectively (according to Honegger): SEQ ID NOs: 34, 43, 40, 37, 41 and 25; and the second antigen binding domain comprises one EC domain of CD4 comprising an amino acid sequence is at least 95% (e.g., at least 99%) identical to a CD4 EC domain of SEQ ID NO:746. In some embodiments, the first antigen binding domain comprises a first VH-CDR1, a first VH-CDR2, a first VH-CDR3, a first VL-CDR1, a first VL-CDR2 and a first VL-CDR3 comprising the following amino acid sequences, respectively (according to Honegger): SEQ ID NOs: 34, 43, 40, 37, 41 and 25; and the second antigen binding domain comprises one EC domain of CD4 comprising the amino acid sequence of SEQ ID NO:746. In some embodiments, the first antigen binding domain comprises a first VH and a first VL comprising the amino acid sequences set forth, respectively, or comprising amino acid sequences that are at least 80%, at least 85%, at least 90%, at least 91%, at least 92%, at least 93%, at least 94%, at least 95%, at least 96%, at least 97%, at least 98%, or at least 99% identical to the amino acid sequences set forth, respectively: SEQ ID NOs: 49 and 55; SEQ ID NOs: 50 and 55; SEQ ID NOs: 50 and 56; SEQ ID NOs: 51 and 55; or SEQ ID NOs: 51 and 56; and the second antigen binding domain comprises one or more EC domains of CD4 comprising an amino acid sequence that comprises or is at least 80%, at least 85%, at least 90%, at least 91%, at least 92%, at least 93%, at least 94%, at least 95%, at least 96%, at least 97%, at least 98%, or at least 99%, identical to a CD4 EC domain selected from the group consisting of SEQ ID NOs: 746-749 (e.g., SEQ ID NO:746). In some embodiments, the first antigen binding domain comprises a first VH and a first VL comprising amino acid sequences that are at least 80%, at least 85%, at least 90%, at least 91%, at least 92%, at least 93%, at least 94%, at least 95%, at least 96%, at least 97%, at least 98%, or at least 99% identical to the amino acid sequences set forth, respectively: SEQ ID NOs: 51 and 56; and the second antigen binding domain comprises one EC domain of CD4 comprising an amino acid sequence that is at least 80%, at least 85%, at least 90%, at least 91%, at least 92%, at least 93%, at least 94%, at least 95%, at least 96%, at least 97%, at least 98%, or at least 99%, identical to a CD4 EC domain of SEQ ID NO:746. In some embodiments, the first antigen binding domain comprises a first VH and a first VL comprising amino acid sequences that are at least 95% identical to the amino acid sequences set forth, respectively: SEQ ID NOs: 51 and 56; and the second antigen binding domain comprises one EC domain of CD4 comprising an amino acid sequence that is at least 95% identical to a CD4 EC domain of SEQ ID NO:746. In some embodiments, the first antigen binding domain comprises a first VH and a first VL comprising amino acid sequences that are at least 95% identical to the amino acid sequences set forth, respectively: SEQ ID NOs: 51 and 56; and the second antigen binding domain comprises one EC domain of CD4 comprising an amino acid sequence that is at least 99% identical to a CD4 EC domain of SEQ ID NO:746. In some embodiments, the first antigen binding domain comprises a first VH and a first VL comprising amino acid sequences that are at least 95% identical to the amino acid sequences set forth, respectively: SEQ ID NOs: 51 and 56; and the second antigen binding domain comprises one EC domain of CD4 comprising an amino acid sequence of SEQ ID NO:746. In some embodiments, the first antigen binding domain comprises a first VH and a first VL comprising amino acid sequences that are at least 99% identical to the amino acid sequences set forth, respectively: SEQ ID NOs: 51 and 56; and the second antigen binding domain comprises one EC domain of CD4 comprising an amino acid sequence that is at least 95% identical to a CD4 EC domain of SEQ ID NO:746. In some embodiments, the first antigen binding domain comprises a first VH and a first VL comprising the amino acid sequences set forth, respectively: SEQ ID NOs: 51 and 56; and the second antigen binding domain comprises one EC domain of CD4 comprising an amino acid sequence that is at least 99% identical to a CD4 EC domain of SEQ ID NO:746. In some embodiments, the first antigen binding domain comprises a first VH and a first VL comprising amino acid sequences that are at least 99% identical to the amino acid sequences set forth, respectively: SEQ ID NOs: 51 and 56; and the second antigen binding domain comprises one EC domain of CD4 comprising an amino acid sequence that is at least 99% identical to a CD4 EC domain of SEQ ID NO:746. In some embodiments, the first antigen binding domain comprises a first VH comprising the amino acid sequence of SEQ ID NO: 51 and a first VL comprising an amino acid sequence that is at least 95% identical to the amino acid sequence of SEQ ID NO: 56; and the second antigen binding domain comprises one EC domain of CD4 comprising an amino acid sequence that is at least 95% identical to a CD4 EC domain of SEQ ID NO:746. In some embodiments, the first antigen binding domain comprises a first VH comprising the amino acid sequence of SEQ ID NO: 51 and a first VL comprising an amino acid sequence that is at least 95% identical to the amino acid sequence of SEQ ID NO: 56; and the second antigen binding domain comprises one EC domain of CD4 comprising an amino acid sequence that is at least 99% identical to a CD4 EC domain of SEQ ID NO:746. In some embodiments, the first antigen binding domain comprises a first VH comprising the amino acid sequence of SEQ ID NO: 51 and a first VL comprising an amino acid sequence that is at least 99% identical to the amino acid sequence of SEQ ID NO: 56; and the second antigen binding domain comprises one EC domain of CD4 comprising an amino acid sequence that is at least 95% identical to a CD4 EC domain of SEQ ID NO:746. In some embodiments, the first antigen binding domain comprises a first VH comprising the amino acid sequence of SEQ ID NO: 51 and a first VL comprising an amino acid sequence that is at least 99% identical to the amino acid sequence of SEQ ID NO: 56; and the second antigen binding domain comprises one EC domain of CD4 comprising an amino acid sequence that is at least 99% identical to a CD4 EC domain of SEQ ID NO:746. In some embodiments, the first antigen binding domain comprises a first VH comprising an amino acid sequence that is at least 95% identical to the amino acid sequence of SEQ ID NO: 51 and a first VL comprising the amino acid sequence of SEQ ID NO: 56; and the second antigen binding domain comprises one EC domain of CD4 comprising an amino acid sequence that is at least 95% identical to a CD4 EC domain of SEQ ID NO:746. In some embodiments, the first antigen binding domain comprises a first VH comprising an amino acid sequence that is at least 95% identical to the amino acid sequence of SEQ ID NO: 51 and a first VL comprising the amino acid sequence of SEQ ID NO: 56; and the second antigen binding domain comprises one EC domain of CD4 comprising an amino acid sequence that is at least 99% identical to a CD4 EC domain of SEQ ID NO:746. In some embodiments, the first antigen binding domain comprises a first VH comprising an amino acid sequence that is at least 99% identical to the amino acid sequence of SEQ ID NO: 51 and a first VL comprising the amino acid sequence of SEQ ID NO: 56; and the second antigen binding domain comprises one EC domain of CD4 comprising an amino acid sequence that is at least 95% identical to a CD4 EC domain of SEQ ID NO:746. In some embodiments, the first antigen binding domain comprises a first VH comprising an amino acid sequence that is at least 99% identical to the amino acid sequence of SEQ ID NO: 51 and a first VL comprising the amino acid sequence of SEQ ID NO: 56; and the second antigen binding domain comprises one EC domain of CD4 comprising an amino acid sequence that is at least 99% identical to a CD4 EC domain of SEQ ID NO:746. In some embodiments, the first antigen binding domain comprises a first VH and a first VL comprising the amino acid sequences set forth, respectively: SEQ ID NOs: 51 and 56; and the second antigen binding domain comprises one EC domain of CD4 comprising an amino acid sequence of SEQ ID NO:746.

[0403] In some embodiments, the kits comprise one or more containers (e.g., vials, ampules) comprising one or more of the multi-specific antigen binding molecules described herein, polynucleotides encoding such multi-specific antigen binding molecules, LNPs or pharmaceutical compositions containing such multi-specific antigen binding molecules.

[0404] In one embodiment, kits comprise the one or more multi-specific antigen binding molecules described herein in combination with one or more (e.g., one, two, three, one or two, or one to three) additional therapeutic agents. In some embodiments, the kits comprise one or more unitary doses of the one or more multi-specific antigen binding molecules, or the polynucleotide or polynucleotides, in one or more containers. In some embodiments, the kits comprise one or more unitary doses of the one or more multi-specific antigen binding molecules and a second agent for treating an HIV infection in separate containers.

[0405] In some embodiments, the kits further comprise one or more unitary doses of a toll-like receptor (TLR) agonist. In some embodiments, the TLR agonist is a TLR7 agonist or a TLR8 agonist. In some embodiments, the TLR7 agonist is selected from the group consisting of vesatolimod, imiquimod, and resiquimod. In some embodiments, the kits comprise a first multi-specific antigen binding molecule and a second antigen binding molecule or antibody or antigen binding fragment thereof, wherein the first multi-specific antigen binding molecule and a second antigen binding molecule or antibody or antigen binding fragment thereof bind to different first and second epitopes or regions of gp120 selected from the group consisting of: (i) third variable loop (V3) (e.g., high mannose patch) comprising a N332 oligomannose glycan; (ii) second variable loop (V2) (e.g., Env trimer apex); (iii) CD4 binding site (CD4bs); (iv) gp120/gp41 interface; or (v) silent face of gp120. In some embodiments, the first multi-specific antigen binding molecule binds to the third variable loop (V3) (e.g., high mannose patch) comprising a N332 oligomannose glycan and the second antigen binding molecule binds to the CD4 binding site (CD4bs).

[0406] In some embodiments, the first multi-specific antigen binding molecule competes with or comprises VH and VL regions from an antibody selected from the group consisting of GS-9722 (elipovimab), GS-2872, PGT-121, PGT-121.66, PGT-121.414, PGT-122, PGT-123, PGT-124, PGT-125, PGT-126, PGT-128, PGT-130, PGT-133, PGT-134, PGT-135, PGT-136, PGT-137, PGT-138, PGT-139, 10-1074, 10-1074-J, VRC24, 2G12, BG18, 354BG8, 354BG18, 354BG42, 354BG33, 354BG129, 354BG188, 354BG411, 354BG426, DH270.1, DH270.6, PGDM12, VRC41.01, PGDM21, PCDN-33A, BF520.1 and VRC29.03, and the second antigen binding molecule or antibody or fragment thereof, competes with or comprises VH and VL regions from an antibody selected from the group consisting of 3BNC117, GS-9723, GS-5423, 3BNC60, b12, F105, VRC01, VRC07, VRC07-523, VRC03, VRC06, VRC06b01 VRC08, VRC0801, NIH45-46, PGV04 (a.k.a., VRC-PG04); CH103, 44-VRC13.01, 1NC9, 12A12, N6, 1-18, N49-P7, NC-Cow1, IOMA, CH235 and CH235.12, N49P6, N49P7, N49P11, N49P9 and N60P25. In some embodiments, the first multi-specific antigen binding molecule competes with or comprises VH and VL regions from an antibody selected from the group consisting of GS-9722 (elipovimab), GS-2872, PGT-121, PGT121.414, 10-1074, 10-1074-J and PGT-134, and the second antigen binding molecule or antibody or antigen binding fragment thereof competes with or comprises VH and VL regions from 3BNC117, GS-9723, VRC07 or VRC07-523.

[0407] In some embodiments, the first multi-specific antigen binding molecule competes with or comprises VH and VL regions from an antibody selected from the group consisting of 3BNC117, GS-9723, GS-5423, 3BNC60, b12, F105, VRC01, VRC07, VRC07-523, VRC03, VRC06, VRC06b01 VRC08, VRC0801, NIH45-46, PGV04 (a.k.a., VRC-PG04); CH103, 44-VRC13.01, 1NC9, 12A12, N6, 1-18, N49-P7, NC-Cow1, IOMA, CH235 and CH235.12, N49P6, N49P7, N49P11, N49P9 and N60P25, and the second antigen binding molecule or antibody or fragment thereof, competes with or comprises VH and VL regions from an antibody selected from the group consisting of GS-9722 (elipovimab), GS-2872, PGT-121, PGT-121.66, PGT-121.414, PGT-122, PGT-123, PGT-124, PGT-125, PGT-126, PGT-128, PGT-130, PGT-133, PGT-134, PGT-135, PGT-136, PGT-137, PGT-138, PGT-139, 10-1074, 10-1074-J, VRC24, 2G12, BG18, 354BG8, 354BG18, 354BG42, 354BG33, 354BG129, 354BG188, 354BG411, 354BG426, DH270.1, DH270.6, PGDM12, VRC41.01, PGDM21, PCDN-33A, BF520.1 and VRC29.03. In some embodiments, the first multi-specific antigen binding molecule competes with or comprises VH and VL regions from an antibody selected from the group consisting of 3BNC117, GS-9723, VRC07 or VRC07-523, and the second antigen binding molecule or antibody or antigen binding fragment thereof competes with or comprises VH and VL regions from GS-9722 (elipovimab), GS-2872, PGT-121, PGT121.414, 10-1074, 10-1074-J and PGT-134.

[0408] In some embodiments, the first multi-specific antigen binding molecule competes with or comprises VH and VL regions from an antibody selected from the group consisting of GS-9722 (elipovimab), GS-2872, PGT-121, PGT121.414, 10-1074, 10-1074-J and PGT-134, and the second antigen binding molecule comprises a soluble extracellular region of CD4 (e.g., domain 1 (D1), D1-D2, D1-D3, D1-D4). In some embodiments, the first multi-specific antigen binding molecule comprises a soluble extracellular region of CD4 (e.g., domain 1 (D1), D1-D2, D1-D3, D1-D4), and the second antigen binding molecule or antibody or fragment thereof, competes with or comprises VH and VL regions from an antibody selected from the group consisting of GS-9722 (elipovimab), GS-2872, PGT-121, PGT-121.66, PGT-121.414, PGT-122, PGT-123, PGT-124, PGT-125, PGT-126, PGT-128, PGT-130, PGT-133, PGT-134, PGT-135, PGT-136, PGT-137, PGT-138, PGT-139, 10-1074, 10-1074-J, VRC24, 2G12, BG18, 354BG8, 354BG18, 354BG42, 354BG33, 354BG129, 354BG188, 354BG411, 354BG426, DH270.1, DH270.6, PGDM12, VRC41.01, PGDM21, PCDN-33A, BF520.1 and VRC29.03. In some embodiments, the first multi-specific antigen binding molecule comprises a soluble extracellular region of CD4 (e.g., domain 1 (D1), D1-D2, D1-D3, D1-D4), and the second antigen binding molecule or antibody or antigen binding fragment thereof competes with or comprises VH and VL regions from GS-9722 (elipovimab), GS-2872, PGT-121, PGT121.414, 10-1074, 10-1074-J and PGT-134.

[0409] In some embodiments, the kits comprise a first multi-specific antigen binding molecule and second and third multi-specific antigen binding molecules or antibodies or fragments thereof. In some embodiments, the first multi-specific antigen binding molecule comprises a soluble extracellular region of CD4 (e.g., domain 1 (D1), D1-D2, D1-D3, D1-D4); the second antigen binding molecule or antibody or fragment thereof, competes with or comprises VH and VL regions from an antibody selected from the group consisting of GS-9722 (elipovimab), GS-2872, PGT-121, PGT-121.66, PGT-121.414, PGT-122, PGT-123, PGT-124, PGT-125, PGT-126, PGT-128, PGT-130, PGT-133, PGT-134, PGT-135, PGT-136, PGT-137, PGT-138, PGT-139, 10-1074, 10-1074-J, VRC24, 2G12, BG18, 354BG8, 354BG18, 354BG42, 354BG33, 354BG129, 354BG188, 354BG411, 354BG426, DH270.1, DH270.6, PGDM12, VRC41.01, PGDM21, PCDN-33A, BF520.1 and VRC29.03; and the third multi-specific antigen binding molecule or antibody or fragment thereof, competes with or comprises VH and VL regions from an antibody selected from the group consisting of 3BNC117, GS-9723, GS-5423, 3BNC60, b12, F105, VRC01, VRC07, VRC07-523, VRC03, VRC06, VRC06b01 VRC08, VRC0801, NIH45-46, PGV04 (a.k.a., VRC-PG04); CH103, 44-VRC13.01, 1NC9, 12A12, N6, 1-18, N49-P7, NC-Cow1, IOMA, CH235 and CH235.12, N49P6, N49P7, N49P11, N49P9 and N60P25. In some embodiments, the first multi-specific antigen binding molecule comprises a soluble extracellular region of CD4 (e.g., domain 1 (D1), D1-D2, D1-D3, D1-D4); the second antigen binding molecule or antibody or fragment thereof, competes with or comprises VH and VL regions from an antibody selected from the group consisting of GS-9722 (elipovimab), GS-2872, PGT-121, PGT121.414, 10-1074, 10-1074-J and PGT-134; and the third multi-specific antigen binding molecule or antibody or antigen binding fragment thereof competes with or comprises VH and VL regions from 3BNC117, GS-9723, VRC07 or VRC07-523.

[0410] In some embodiments, the kits comprise two or more unitary doses of one or more multi-specific antigen binding molecules, and optionally, one or more anti-HIV bNAbs, wherein the unitary doses are the same. In some embodiments, the kits comprise two or more unitary doses of one or more multi-specific antigen binding molecules, and optionally, one or more anti-HIV bNAbs, wherein the unitary doses are different.

[0411] In one embodiment, the additional therapeutic agent or agents of the kit is an anti-HIV agent, selected from HIV protease inhibitors, HIV non-nucleoside or non-nucleotide inhibitors of reverse transcriptase, HIV nucleoside or nucleotide inhibitors of reverse transcriptase, HIV integrase inhibitors, HIV non-catalytic site (or allosteric) integrase inhibitors, HIV entry inhibitors, HIV maturation inhibitors, immunomodulators, immunotherapeutic agents, antibody-drug conjugates, gene modifiers, gene editors (such as CRISPR/Cas9, zinc finger nucleases, homing nucleases, synthetic nucleases, TALENs), cell therapies (such as chimeric antigen receptor T-cell, CAR-T, and engineered T cell receptors, TCR-T, autologous T cell therapies), compounds that target the HIV capsid, latency reversing agents, HIV bNAbs, immune-based therapies, phosphatidylinositol 3-kinase (PI3K) inhibitors, HIV antibodies, broadly neutralizing HIV antibodies, bispecific antibodies and “antibody-like” therapeutic proteins, HIV p17 matrix protein inhibitors, IL-13 antagonists, peptidyl-prolyl cis-trans isomerase A modulators, protein disulfide isomerase inhibitors, complement C5a receptor antagonists, DNA methyltransferase inhibitor, HIV vif gene modulators, Vif dimerization antagonists, HIV viral infectivity factor inhibitors, TAT protein inhibitors, HIV Nef modulators, Hck tyrosine kinase modulators, mixed lineage kinase-3 (MLK-3) inhibitors, HIV splicing inhibitors, Rev protein inhibitors, integrin antagonists, nucleoprotein inhibitors, splicing factor modulators, COMM domain containing protein 1 modulators, HIV ribonuclease H inhibitors, retrocyclin modulators, CDK-9 inhibitors, dendritic ICAM-3 grabbing nonintegrin 1 inhibitors, HIV GAG protein inhibitors, HIV POL protein inhibitors, Complement Factor H modulators, ubiquitin ligase inhibitors, deoxycytidine kinase inhibitors, cyclin dependent kinase inhibitors, proprotein convertase PC9 stimulators, ATP dependent RNA helicase DDX3X inhibitors, reverse transcriptase priming complex inhibitors, G6PD and NADH-oxidase inhibitors, pharmacokinetic enhancers, HIV gene therapy, HIV vaccines, and combinations thereof.

[0412] In some embodiments, the additional therapeutic agent or agents of the kit are selected from combination drugs for HIV, other drugs for treating HIV, HIV protease inhibitors, HIV reverse transcriptase inhibitors, HIV integrase inhibitors, HIV non-catalytic site (or allosteric) integrase inhibitors, HIV entry (fusion) inhibitors, HIV maturation inhibitors, latency reversing agents, capsid inhibitors, immune-based therapies, PI3K inhibitors, HIV antibodies, and bispecific antibodies, and “antibody-like” therapeutic proteins, and combinations thereof.

[0413] In a specific embodiment, the kit includes a multi-specific antigen binding molecule, polynucleotide encoding or pharmaceutical composition comprising, and an HIV nucleoside or nucleotide inhibitor of reverse transcriptase. In a specific embodiment, the kit includes a multi-specific antigen binding molecule, polynucleotide encoding or pharmaceutical composition comprising, and an HIV nucleoside or nucleotide inhibitor of reverse transcriptase and an HIV non-nucleoside inhibitor of reverse transcriptase. In another specific embodiment, the kit includes a multi-specific antigen binding molecule, polynucleotide encoding or pharmaceutical composition comprising, and an HIV nucleoside or nucleotide inhibitor of reverse transcriptase, and an HIV protease inhibiting compound. In an additional embodiment, the kit includes a multi-specific antigen binding molecule, polynucleotide encoding or pharmaceutical composition comprising, and an HIV nucleoside or nucleotide inhibitor of reverse transcriptase, an HIV non-nucleoside inhibitor of reverse transcriptase, and a pharmacokinetic enhancer. In certain embodiments, the kit includes a multi-specific antigen binding molecule, polynucleotide encoding or pharmaceutical composition comprising, and at least one HIV nucleoside inhibitor of reverse transcriptase, an integrase inhibitor, and a pharmacokinetic enhancer. In another embodiment, the kit includes a multi-specific antigen binding molecule, polynucleotide encoding or pharmaceutical composition comprising, and two HIV nucleoside or nucleotide inhibitors of reverse transcriptase. In a specific embodiment, the kit includes a multi-specific antigen binding molecule, polynucleotide encoding or pharmaceutical composition comprising, and an HIV nucleoside or nucleotide inhibitor of reverse transcriptase and an HIV capsid inhibitor. In a specific embodiment, the kit includes a multi-specific antigen binding molecule, polynucleotide encoding or pharmaceutical composition comprising, and an HIV nucleoside inhibitor of reverse transcriptase and an HIV capsid inhibitor. In a specific embodiment, the kit includes a multi-specific antigen binding molecule, polynucleotide encoding or pharmaceutical composition comprising, and an HIV capsid inhibitor. In a specific embodiment, the kit includes a multi-specific antigen binding molecule, polynucleotide encoding or pharmaceutical composition comprising, and one, two, three or four HIV bNAbs. In a specific embodiment, the kit includes a multi-specific antigen binding molecule, polynucleotide encoding or pharmaceutical composition comprising, and one, two, three or four HIV bNAbs and an HIV capsid inhibitor. In a specific embodiment, the kit includes a multi-specific antigen binding molecule, polynucleotide encoding or pharmaceutical composition comprising, and one, two, three or four HIV bNAbs, an HIV capsid inhibitor, and an HIV nucleoside inhibitor of reverse transcriptase.

[0414] In one embodiment, the kit comprises one or more pharmaceutical packs comprising one or more containers (e.g., vials, ampules) containing one or more of the ingredients of the pharmaceutical compositions described herein, such as one or more multi-specific (e.g., bispecific antibodies) provided herein. In some instances, the kits contain a pharmaceutical composition described herein. In one embodiment, kits comprising a multi-specific antigen binding molecule disclosed herein, or a pharmaceutical composition thereof, in combination with one or more (e.g., one, two, three, one or two, or one to three) additional therapeutic agents (such as those disclosed above) are provided.

[0415] Optionally associated with such container(s) can be a notice in the form prescribed by a governmental agency regulating the manufacture, use or sale of pharmaceuticals or biological products, which notice reflects approval by the agency of manufacture, use or sale for human administration.

### EXAMPLES

[0416] The following examples are offered to illustrate, but not to limit the claimed invention.

### Example 1

### Humanization of Mouse SP34 Variable Domains

[0417] Bispecific antibodies, in which one of the antigen binding domains interacts with the human CD3 extracellular domain (referred to as “CD3 bispecific antibodies hereafter”) can re-direct CD3+ T-cells to kill target cells expressing a second antigen (e.g., Blinatumomab recruitment of CD3+ T-cells to kill CD19+B-cells). The anti-CD3 binding domain can be used in a modular fashion to re-direct T-cells to attack cells expressing any target antigen of interest (e.g. tumor antigens or viral antigens). In most cases, the anti-CD3 antibody is selected to be cross-reactive to non-human primate (NHP) CD3, thus facilitating animal efficacy and toxicity studies. These animal studies are of critical importance given the potential for toxicity associated with CD3 engaging bispecific antibodies. However, a review of the literature suggests that current generation anti-CD3 bispecific antibodies suffer from numerous challenges in pre-clinical studies.

[0418] A 2017 FDA analysis of investigational new drug (IND) applications for clinical stage CD3 bispecific antibodies found that anti-drug-antibodies (ADA) presented significant pre-clinical challenges for all 10 INDs analyzed (Saber, et al. Regul. Toxicol. Pharmacol. (2017) 90:144-152). These high preclinical ADA rates may cause difficulty in conducting and/or interpreting pre-clinical efficacy and toxicity studies. In at least one of the examples analyzed by Saber et al, where clinical data was also available, approximately 60% of patients developed ADA. Although this data is far from definitive, and it is generally accepted that high ADA rates in NHP do not correlate with high ADA rates in humans (van Meer, et al. mAbs (2013) 5:810-816), these results suggest that prior to the present disclosure, there did not exist anti-CD3 antibodies with low immunogenicity in both NHPs and humans in order to facilitate both the pre-clinical and clinical study of CD3 bispecific antibodies for the treatment of human diseases. This may be particularly important outside of heme malignancies (e.g. solid tumors, infectious disease) where elimination of the target cell type (e.g. B-cells) can often limit the host immune response and reduce or eliminate the negative impacts of ADA. Further, it is not feasible to implement a high dose strategy in toxicology studies for immune activating biologics in NHP where ADA is observed, where a high dose overcomes the ADA (e.g., “dosing through” ADA), due to dose-related toxicity.

[0419] The murine SP34 (mSP34) antibody binds human CD3 and cross reacts with many primate CD3 proteins with similar affinity (Pessano, et al., EMBO J. (1985) 4:337-344, Conrad, et al. Cytometry A. (2007) 71:925-933). For this reason, humanized variants of mSP34 (huSP34) are among the most commonly used anti-CD3 domains in clinical stage bispecific antibodies. To better understand potential sources of immunogenicity, we conducted a primary sequence analysis of mSP34 as well as a panel of six clinical stage huSP34 variants. Sequences were obtained from the WHO Drug Information INN lists (who.int/medicines/publications/druginformation/innlists/en/), and all antibodies with ≤2 amino acid mismatches to mSP34 across both CDR H3 and CDR L3 were compiled. The variable heavy (VH) and variable light (VL) sequences of these antibodies along with that of Trastuzumab (anti-HER2) were compared to the closest human germlines using the IMGT domain-gap-align server (imgt.org/3Dstructure-DB/cgi/DomainGapAlign.cgi). The results of this analysis (Table 1) demonstrate that mSP34 and all clinical stage comparators that were analyzed exhibit lower variable (Fv) identity to the human germline (≤80% ID) when compared to Trastuzumab (82% ID), a humanized antibody with low clinical ADA rates (Jackisch, et al., Annals of Oncology (2015) 26: 320-325).

TABLE 1
Similarity of mSP34 Fv and clinical stage huSP34 Fv to the human germline

| | VH % ID | | VL % ID | | Fv % ID |
|---|---|---|---|---|---|
| | Human | Closest Human | Human | Closest Human | Human |
| Name | Germline | VH Germline | Germline | VL Germline | Germline |
| mSP34 Fv | 71 | IGHV3-73*01 | 65 | IGLV7-46*01 | 69 |
| | | IGHJ4*1 | | IGLJ3*02 | |
| Comparator #5 | 80 | IGHV3-73*01 | 77 | IGLV7-46*01 | 79 |
| Fv | | IGHJ4*01 | | IGLJ3*02 | |
| Comparator #1 | 80 | IGHV3-73*01 | 78 | IGLV7-46*01 | 79 |
| Fv | | IGHJ4*01 | | IGLJ3*02 | |
| Comparator #2 | 75 | IGHV3-73*01 | 73 | IGLV8-61*01 | 74 |
| Fv | | IGHJ4*01 | | IGLJ3*02 | |
| Comparator #3 | 81 | IGHV3-72*01 | 79 | IGLV7-46*01 | 80 |
| Fv | | IGHJ4*01 | | IGLJ3*02 | |
| Comparator #4 | 80 | IGHV3-23*03 | 80 | IGLV7-46*01 | 80 |
| Fv | | IGHJ4*01 | | IGLJ3*02 | |
| hu4D5 Fv | 78 | IGHV3-66*01 | 87 | IGKV1-39*01 | 82 |
| Trastuzumab | | IGHJ4*01 | | IGKJ1*01 | |

[0420] In addition to the primary sequence, post-translational modification to antibodies, such as oxidation, deamidation and aspartate isomerization have also been implicated in the immunogenicity of biotherapeutics (FDA Guidance For Industry “Immunogenicity Assessment for Therapeutic Protein Products,” by U.S. Department of Health and Human Services Food and Drug Administration, Center for Drug Evaluation and Research (CDER), Center for Biologics Evaluation and Research (CBER), August 2014, Clinical/Medical; available at fda.gov/media/85017/download). The primary sequence of a biotherapeutic contributes to the risk of these modifications, and as such, they are often referred to as “sequence liabilities.” Modification of sequence liabilities can also lead to structural and functional heterogeneity in the final purified product that can complicate manufacturing and product stability (Lu, et al., mAbs (2019) 11:45-57). To better understand if mSP34 and clinical stage huSP34 variants contained solvent exposed sequence liabilities, we generated mSP34 homology models and conducted a primary sequence analysis of all solvent exposed sequence liabilities in mSP34 and clinical stage comparator Fv domains (FIGS. 1-2). The results suggest that mSP34 and many huSP34 variants contains several theoretical sequence liabilities that could potentially lead to product heterogeneity, manufacturing difficulties and increased immunogenic risk.

[0421] Aggregation propensity has also been associated with the immunogenicity of biotherapeutics (Rosenberg, AAPS J. (2006) 8:E501-507, Seidl, et al. Pharm Res. (2012) 29:1454-1467). Engineering of antibodies including humanization and conversion to scFv formats can lead to unintended increases in aggregation propensity (Glockshuber, et al., Biochemistry (1990) 29: 1362-1367, Warn and Plickthun. J. Mol. Biol. (2001) 305: 989-1010). It is not known if humanization of mSP34 or other anti-CD3 binding domains can influence the aggregation propensity and/or immunogenic risk of CD3 engaging bispecific antibodies.

[0422] The affinity of anti-CD3 antibodies has been reported to impact both targeted cell-killing potency as well as pharmacokinetics (PK) (Ellerman, Methods (2019) 154:102-117). In animal models containing cross-reactive CD3 antigens, anti-CD3 antibodies with higher affinities (<10 nM) are associated with reduced antibody half-life, while anti-CD3 antibodies with lower affinities (>10 nM) are associated with improved antibody half-life similar to that observed in the same animal model without a cross-reactive CD3 antigen (Leong, et al., Blood (2017) 129:609-618). This suggests that CD3 target mediated drug disposition (TMDD) may play a role in limiting the PK half-life of high affinity anti-CD3 mAbs. However, antibody polyspecificity or polyreactivity can also influence the PK half-life of antibodies (HOtzel, et al., mAbs (2012) 4:753-760) and mutations that increase antibody affinity are sometimes associated with reductions in antibody specificity (Rabia et al., Biochem Eng. J. (2018) 137:365-374). It is not clear if it is possible to identify an anti-CD3 antibody with both high CD3 affinity and corresponding high targeted killing potency with the PK characteristics of a typical IgG.

[0423] Based on these challenges and considerations, we sought to develop an anti-CD3 antibody variable domain with (i) a high affinity for human and non-human primate (NHP) (e.g., to facilitate pre-clinical toxicity studies) CD3, (ii) a high sequence similarity to the human germline (e.g., to reduce or eliminate risk of immunogenicity and ADA reactions in human patients), (iii) IgG-like PK properties with no evidence of ADA in non-human primates (e.g., to facilitate pre-clinical efficacy and toxicity studies), (iv) reduced product heterogeneity via removal of sequence liabilities (e.g., deamidation, aspartate isomerization) to improve ease of manufacturing, (v) high thermodynamic stability (to ensure product stability), (vi) low aggregate content (to reduce risk of immunogenicity) and (vii) low polyspecificity (to reduce the risk of immunogenicity and improve PK properties). We also sought to develop such an anti-CD3 antibody with (viii) a heavy chain variable region (VH) with low or no binding to Protein A affinity chromatography resin in order to facilitate purification of bispecific antibody heterodimers. Finally, we sought to develop an anti-CD3 antibody variable domain that possessed all these properties as an scFv or Fab, such that it could be incorporated into a variety of bispecific antibody formats containing three or fewer polypeptide chains to limit light chain miss-pairing or other sources of bispecific antibody product heterogeneity (Example 2).

[0424] We selected the murine SP34 antibody as a starting point for humanization because it binds human CD3 and cross-reacts with many primate CD3 proteins (Pessano, et al. EMBO J. (1985) 4:337-344, Conrad, et al., Cytometry A (2007) 71:925-933).

[0425] The sequences of the murine SP34 (mSP34) variable heavy (VH) and variable light (VL) domains are shown below.

mSP34 VH
(SEQ ID NO: 713)
EVKLLESGGGLVQPKGSLKLSCAASGFTFNTYAMNWVRQAPGKGLEWVAR
IRSKYNNYATYYADSVKDRFTISRDDSQSILYLQMNNLKTEDTAMYYCVR
HGNFGNSYVSWFAYWGQGTLVTVSA
mSP34 VL
(SEQ ID NO: 714)
QAVVTQESALTTSPGETVTLTCRSSTGAVTTSNYANWVQEKPDHLFTGLI
GGTNKRAPGVPARFSGSLIGDKAALTITGAQTEDEAIYFCALWYSNLWVF
GGGTKLTVLG

[0426] The mSP34 VH and VL sequences were compared to the IMGT database (imgt.org) to identify suitable target human germlines for humanization. The closest heavy chain variable (V) and joining (J) segment matches identified were IGHV3-72 and IGHJ6 respectively. The closest light chain variable (V) and joining (J) segment matches identified were IGLV7-46 and IGLJ3 respectively. Next, we used the default homology modeling protocol in Discovery Studio 2017r2 (Biovia) to generate a structure model of mSP34, using a dual-affinity re-targeting (DART®) bispecific molecule as a template for homology modeling (Root, et al., Antibodies (Basel) (2016) 5(1):6; RCSB Protein Data Bank (PDB) ID: 5FCS; resb.org/structure/5FCS). We further used the default antibody modeling cascade protocol in Discovery Studio 2017r2 to generate structural models of the target human germline antibodies. By superposing these two homology models (FIG. 3), we identified CDR graft points as well as framework residues from mSP34 to retain in huSP34. Consistent with the goals outlined above, we also explored whether mSP34 CDR residues could be mutated to human germline residues in order to increase identity to the human germline and further reduce the risk of immunogenicity, whether germline consensus residues and structure guided salt-bridges could be used to stabilize and/or improve structural or functional properties, and also mutated residues involved in putative sequence liabilities to assess their role in product heterogeneity.

[0427] The initial round of structure-based humanization for mSP34 led to the design of 6 VL and 10 VH variants. The sequences of these variants are shown aligned to mSP34 and the human germline target VH and VL sequences in FIGS. 4A-4B. The human germline identity of all 60 possible huSP34 combinations are shown in Table 2. The amino acid sequences of the variable region sequences of HC1-HC10 are provided in Table 3. The amino acid sequences of the variable region sequences of LC1-LC6 are provided in Table 4.

TABLE 2
First round huSP34 Fv variant percentage identify to the human germline

| | HC1 | HC2 | HC3 | HC4 | HC5 | HC6 | HC7 | HC8 | HC9 | HC10 |
|---|---|---|---|---|---|---|---|---|---|---|
| LC1 | 80 | 80 | 79.6 | 80 | 79.1 | 78.7 | 81.3 | 81.3 | 81.7 | 81.7 |
| LC2 | 82.1 | 82.1 | 81.7 | 82.1 | 81.3 | 80.9 | 83.4 | 83.4 | 83.8 | 83.8 |
| LC3 | 82.1 | 82.1 | 81.7 | 82.1 | 81.3 | 80.9 | 83.4 | 83.4 | 83.8 | 83.8 |
| LC4 | 82.6 | 82.6 | 82.1 | 82.6 | 81.7 | 81.3 | 83.8 | 83.8 | 84.3 | 84.3 |
| LC5 | 83.8 | 83.8 | 83.4 | 83.8 | 83 | 82.6 | 85.1 | 85.1 | 85.5 | 85.5 |
| LC6 | 81.7 | 81.7 | 81.3 | 81.7 | 80.9 | 80.4 | 83 | 83 | 83.4 | 83.4 |

TABLE 3
Amino Acid Sequences of the Variable Region
Sequences of HC1-HC10

| | SEQ ID | |
|---|---|---|
| Name | NO: | Amino acid sequence |
| HC1 | 53 | EVQLVESGGGLVQPGGSLRLSCAASGFTFNTYAMNWVRQAPGKGLE |
| | | WVGRIRSKYNNYATYYAASVKGRFTISRDDSKNSLYLQMNSLKTED |
| | | TAMYYCVRHGNFGNSYVSWFAYWGQGTLVTVSS |
| HC2 | 715 | EVQLVESGGGLVQPGGSLRLSCAASGFTFSTYAMNWVRQAPGKGLE |
| | | WVGRIRSKYNNYATYYAASVKGRFTISRDDSKNSLYLQMNSLKTED |
| | | TAMYYCVRHGNFGNSYVSWFAVWGQGTLVTVSS |
| HC3 | 50 | EVQLVESGGGLVQPGGSLRLSCAASGFTFNTYAMNWVRQAPGKGLE |
| | | WVGRIRSKYNNYATYYADSVKGRFTISRDDSKNSLYLQMNSLRTED |
| | | TAVYYCVRHGNFGHSYVSWFAYWGQGTLVTVSS |
| HC4 | 716 | EVQLVESGGGLVQPGGSLRLSCAASGFTFSTYAMNWVRQAPGKGLE |
| | | WVGRIRSKYNNYATYYAASVKGRFTISRDDSKNSLYLQMNSLRTED |
| | | TAVYYCVRHGNFGHSYVSWFAVWGQGTLVTVSS |
| HC5 | 717 | EVQLVESGGGLVQPGGSLRLSCAASGFTFSTYAMNWVRQAPGKGLE |
| | | WVGRIRSKYNNYATYYADSVKGRFTISRDNSKNTLYLQMNSLRAED |
| | | TAVYYCVRHGNFGHSYVSWFAVWGQGTLVTVSS |
| HC6 | 718 | EVQLVESGGGLVQPGGSLRLSCAASGFTFSTYAMNWVRQAPGKGLE |
| | | WVGRIRSKYNNYATYYADSVKGRFTISRDNSKNTLYLQMNSLRAED |
| | | TAMYYCVRHGNFGNSYVSWFAVWGQGTLVTVSS |
| HC7 | 719 | EVQLVESGGGLVQPGGSLRLSCAASGFTFSDYAMNWVRQAPGKGLE |
| | | WVGRTRSKYNNYATYYAASVKGRFTISRDDSKNSLYLQMNSLKTED |
| | | TAVYYCVRHGNFGNSYVSWFAVWGQGTLVTVSS |
| HC8 | 720 | EVQLVESGGGLVQPGGSLRLSCAASGFTFSDYAMNWVRQAPGKGLE |
| | | WVGRTRSKYNNYATYYAASVKGRFTISRDDSKNSLYLQMNSLKTED |
| | | TAVYYCVRHGNFGHSYVSWFAVWGQGTLVTVSS |
| HC9 | 721 | EVQLVESGGGLVQPGGSLRLSCAASGFTFSDYAMNWVRQAPGKGLE |
| | | WVGRTRSKYNSYATYYAASVKGRFTISRDDSKNSLYLQMNSLKTED |
| | | TAVYYCVRHGNFGNSYVSWFAVWGQGTLVTVSS |
| HC10 | 722 | EVQLVESGGGLVQPGGSLRLSCAASGFTFSDYAMNWVRQAPGKGLE |
| | | WVGRTRSKYNSYATYYAASVKGRFTISRDDSKNSLYLQMNSLKTED |
| | | TAVYYCVRHGNFGHSYVSWFAVWGQGTLVTVSS |

TABLE 4
Amino Acid Sequences of the Variable Region
Sequences of LC1-LC6

| | SEQ ID | |
|---|---|---|
| Name | NO: | Amino acid sequence |
| LC1 | 723 | QAVVTQEPSLTVSPGGTVTLTCRSSTGAVTTSNYANWVQQKPGQAP |
| | | RGLIGGTNKRAPWTPARFSGSLIGDKAALTLSGAQPEDEAEYYCAL |
| | | WYSNLWVFGGGTKLTVL |
| LC2 | 724 | QAVVTQEPSLTVSPGGTVTLTCGSSTGAVTTSNYANWVQQKPGQAP |
| | | RGLIGGTSNRAPWTPARFSGSLLGGKAALTLSGAQPEDEAEYYCAL |
| | | WYSNLWVFGGGTKLTVL |
| LC3 | 57 | QAVVTQEPSLTVSPGGTVTLTCGSSTGAVTTGHYANWVQQKPGQAP |
| | | RGLIGGTNKRAPWTPARFSGSLLGGKAALTLSGAQPEDEAEYYCAL |
| | | WYSNLWVFGGGTKLTVL |
| LC4 | 725 | QAVVTQEPSLTVSPGGTVTLTCGSSTGAVTTSHYANWVQQKPGQAP |
| | | RGLIGGTSKRAPWTPARFSGSLLGGKAALTLSGAQPEDEAEYYCAL |
| | | WYSALWVFGGGTKLTVL |
| LC5 | 726 | QAVVTQEPSLTVSPGGTVTLTCGSSTGAVTTGHYANWVQQKPGQAP |
| | | RGLIGGTSNRAPWTPARFSGSLLGGKAALTLSGAQPEDEAEYYCAL |
| | | WYSARWVFGGGTKLTVL |
| LC6 | 727 | QAVVTQPPSLTVSPGGTVTLTCGSSTGAVTTGHYANWVQQKPGQAP |
| | | RGLIGGTSNRAPGVPARFSGSLSGGKAALTISGAQPEDEAEYYCAL |
| | | WYSARWVFGGGTKLTVL |

[0428] All 60 possible combinations of huSP34 heavy chain and light chain variants (the 1 st round huSP34 variants), as well as the mSP34 parent antibody and a comparator huSP34 molecule (Comparator #6), were then expressed in HEK293 cells as Fabs incorporating a human CH1 domain and a human lambda light chain constant domain. The heavy chain Fab polypeptide incorporated a C-terminal His8-Flag tag (His8 or HHHHHHHH disclosed as SEQ ID NO: 1041) to facilitate purification using standard nickel affinity chromatography methods (Porath, et al., Nature (1975) 258: 598-599). The resulting Fabs were subjected to analysis using the following methods: expression titer assessment, analytical size exclusion chromatography (SEC) to assess structural heterogeneity, analytical CX-1 ion exchange chromatography to assess charge heterogeneity, thermal denaturation to determine melting temperature (Tm) and aggregation temperature (Tagg), competition flow cytometry binding to primary T-cells to assess relative T-cell binding compared to mSP34, affinity analysis using Octet in order to assess relative binding kinetics (kₒₙ and k_{off}) and dissociation constants (K_{D}), and competition flow cytometry assays to assess relative binding affinity to human T-cells as outlined in Examples 4, 5, 7 and 8.

[0429] The resulting data revealed several unexpected observations. The majority of humanized Fab variants from round 1 had significantly higher melting temperatures than the chimeric mSP34 Fab containing mSP34 variable regions fused to human constant domains. This suggested that the structure-guided humanization improved the thermodynamic stability of this molecule (Example 4). However, both the competition flow cytometry and Octet biolayer interferometry (BLI) assays suggested that the round 1 huSP34 variants had reduced CD3 binding affinity compared to the mSP34 chimeric Fab (Examples 5 and 8). Furthermore, the majority of purified round 1 huSP34 Fab variants demonstrated more charge-based heterogeneity when analyzed using strong cation exchange chromatography, and an increase in aggregate levels as measured by size exclusion chromatography when compared to mSP34 chimeric Fab (Example 4). By analyzing the relationship between the sequences of the huSP34 variants and their functional and biophysical properties (sequence-activity relationships or SAR) we identified multiple amino acids associated with improved properties (Examples 4 and 5). This allowed for the rational design of new variants (the second round huSP34 variants) incorporating mutations designed to optimize the various functional and biophysical properties assayed (Examples 4, 5, 7 and 8). The sequences of the heavy chain and light chain variable domains used in the second round huSP34 variants are shown in FIGS. 5A-5B.

[0430] All 16 possible combinations of the second round huSP34 heavy chain and light chain variants were expressed in HEK293 cells as Fabs incorporating a human CH1 domain and a human lambda light chain constant domain. The human germline identities of the second round huSP34 variants are shown in Table 5. The amino acid sequences of the variable region sequences of HC11-HC13 are provided in Table 6. The amino acid sequences of the variable region sequences of LC7-LC10 are provided in Table 7. The heavy chain Fab polypeptide incorporated a C-terminal His8-Flag tag (His8 or HHHHHHHH disclosed as SEQ ID NO: 1041) to facilitate purification using standard nickel affinity chromatography methods (Porath, et al., supra). After purification, the resulting Fabs were subjected to analysis using the following methods: analytical size exclusion chromatography (SEC), analytical CX-1 ion exchange chromatography, affinity analysis using Octet, and competition flow cytometry on human T-cells as outlined in Examples 4, 5, and 8. The results of the analysis revealed that our SAR guided approach was successful, as many of the second round huSP34 variants had improved affinity, improved CX-1 profiles (e.g. reduced heterogeneity) and improved SEC profiles (e.g. reduced aggregate levels) all while maintaining a high match to the human germline when compared to the first-round variants, the mSP34 chimeric Fab and comparator molecules (FIG. 6).

TABLE 5
Second round huSP34 Fv variant percentage
identify to the human germline

| | HC3 | HC11 | HC12 | HC13 |
|---|---|---|---|---|
| LC7 | 80 | 80.9 | 80.4 | 81.3 |
| LC8 | 80.9 | 81.7 | 81.3 | 82.1 |
| LC9 | 79.6 | 80.4 | 80 | 80.9 |
| LC10 | 80 | 80.9 | 80.4 | 81.3 |

TABLE 6
Amino Acid Sequences of the Variable Region
Sequences of HC11-HC13

| | SEQ ID | |
|---|---|---|
| Name | NO: | Amino acid sequence |
| HC11 | 728 | EVQLVESGGGLVQPGGSLRLSCAASGFTFSTYAMNWVRQAPGKGLE |
| | | WVGRIRSKYNNYATYYAASVKGRFTISRDDSKNSLYLQMNSLRTED |
| | | TAVYYCVRHGNFGHSYVSWFAYWGQGTLVTVSS |
| HC12 | 729 | EVQLVESGGGLVQPGGSLRLSCAASGFTFSTYAMNWVRQAPGKGLE |
| | | WVARIRSKYNNYATYYAASVKGRFTISRDDSKNSLYLQMNSLRTED |
| | | TAVYYCVRHGNFGHSYVSWFAYWGQGTLVTVSS |
| HC13 | 730 | EVQLVESGGGLVQPGGSLRLSCAASGFTFSTYAMNWVRQAPGKGLE |
| | | WVGRIRSKYNNYATYYAASVKGRFTISRDDSKNTLYLQMNSLRTED |
| | | TAVYYCVRHGNFGHSYVSWFAYWGQGTLVTVSS |

TABLE 7
Amino Acid Sequences of the Variable Region
Sequences of LC7-LC10

| | SEQ ID | |
|---|---|---|
| Name | NO: | Amino acid sequence |
| LC7 | 731 | QAVVTQEPSLTVSPGGTVTLTCRSSTGAVTTGHYANWVQQKPGQAP |
| | | RGLIGGTNKRAPGVPARFSGSLLGGKAALTISGAQPEDEAEYYCAL |
| | | WYSNLWVFGGGTKLTVL |
| LC8 | 58 | QAVVTQEPSLTVSPGGTVTLTCGSSTGAVTTGHYANWVQQKPGQAP |
| | | RGLIGGTNKRAPGVPARFSGSLLGGKAALTISGAQPEDEAEYYCAL |
| | | WYSNRWVFGGGTKLTVL |
| LC9 | 732 | QAVVTQPPSLTVSPGGTVTLTCGSSTGAVTTGHYANWVQQKPGQAP |
| | | RGLIGGTNKRAPGVPARFSGSLSGGKAALTISGAQPEDEAEYYCAL |
| | | WYSNLWVFGGGTKLTVL |
| LC10 | 733 | QAVVTQPPSLTVSPGGTVTLTCGSSTGAVTTGHYANWVQQKPGQAP |
| | | RGLIGGTNKRAPGVPARFSGSLSGGKAALTISGAQPEDEAEYYCAL |
| | | WYSNRWVFGGGTKLTVL |

[0431] Selected first and second round huSP34 Fab variants were next reformatted as anti-HIV gp120 bispecific antibodies (Example 2). These antibodies were assessed in vitro in T-cell binding (Example 9) and T-cell mediated killing assays targeting HIV infected cells (Examples 10-11). The results demonstrated that the bispecific antibodies incorporating the huSP34 anti-CD3 binding arms potently killed HIV infected cells, and also showed the killing potency was directly correlated with anti-CD3 affinity.

[0432] Selected bispecific antibodies containing first and second round huSP34 variants were next tested in non-human primate PK assays (Example 13). Antibodies were tested in the presence and absence of Fc mutations, each made in only one of the two Fc domains, known to impact Protein A binding as well as enhance FcRn binding. Surprisingly, bispecific antibodies incorporating the lower affinity first round huSP34.1.3 scFv showed ideal IgG-like PK properties and no evidence of ADAs, consistent with our design goals, while bispecific antibodies incorporating the higher affinity second round huSP34.13.10 scFv demonstrated increased clearance, reduced half-life and high apparent rates of ADA induction. While mutations that eliminated Protein A binding (e.g. H435R, H435R+Y436F, Jendeberg, et al., J. Immunol. Methods (1997) 201:25-34) did not appear to significantly impact PK, certain mutations that improved pH dependent FcRn binding (YTE) did appear to mitigate some of the undesirable PK properties introduced by the high affinity huSP34.13.8 variant. Unfortunately, these FcRn binding mutations did not appear to eliminate the apparent high ADA rates observed for bispecific antibodies incorporating higher affinity second round huSP34 scFv domains. The huSP34.1.3 variant did not show the highest potency in our killing assays, and it also contained the N100 residue in CDR H3 that appeared to be associated with increased product heterogeneity. We thus set out to conduct a third round of humanization seeking to identify a high affinity huSP34 variant containing the N100H mutation in CDRH3 and demonstrating ideal IgG-like PK properties and no evidence of ADA induction in non-human primates.

[0433] Although CD3 affinity has been directly implicated in the PK properties of bispecific antibodies (Ellerman, Methods (2019) 154:102-117), antibody polyspecificity can also influence PK (HOtzel, et al., mAbs (2012) 4:753-760) and was not tested during the first and second rounds of humanization. We thus generated a panel of the highest affinity huSP34 variants from rounds one and two as human IgG1 antibodies, thus enabling additional biophysical assessment (Example 4) including polyspecificity analysis using baculoviral particle (BVP) assays (Example 7). The BVP results revealed significant differences in polyspecificity within the huSP34 IgG1 panel. Selected bispecific antibodies, including those containing the huSP34.1.3 and huSP34.13.10 scFv were also tested in the BVP assay and revealed a direct correlation between moderate to high BVP scores and poor PK parameters.

[0434] We next used the BVP data to guide the selection of three distinct huSP34 variants to be used as starting points for the third round of humanization. The huSP34.1.3 variant was selected based on its low BVP score and ideal PK properties. The huSP34.3.8 variant was selected based on its low BVP score, high affinity and excellent results across all biophysical screening assays. The huSP34.1.10 variant had not yet been produced or tested in any form, but was selected based on the observation of SAR around HC1 and LC10—both of which were associated with the lowest BVP scores. To determine if polyspecificity or affinity attributes contributed to the in vivo PK properties of the huSP34 containing bispecific antibodies, we generated variants with a range of affinities using SAR data from the first and second rounds of humanization. We further incorporated the N100H mutation into all tested variants (where not already present in any of the three lead variants) to eliminate the HC CDR H3 deamidation motif and reduce product heterogeneity as observed in the analytical CX-1 analysis. The identity of the third round huSP34 variants compared to the human germline is shown in Table 8. The amino acid sequences of the variable region sequences of HC34-HC38 are provided in Table 9. The amino acid sequences of the variable region sequences of LC11-LC20 are provided in Table 10.

TABLE 8
Third round huSP34 Fv variant percentage
identify to the human germline

| Heavy Chain | Light Chain | % ID human |
|---|---|---|
| Variant | Variant | Germline |
| 34 | 10 | 80.4 |
| 34 | 14 | 81.3 |
| 34 | 15 | 80.9 |
| 34 | 12 | 81.3 |
| 34 | 6 | 81.7 |
| 35 | 10 | 81.3 |
| 34 | 16 | 82.1 |
| 35 | 14 | 82.1 |
| 34 | 17 | 81.7 |
| 35 | 15 | 81.7 |
| 34 | 18 | 82.6 |
| 35 | 12 | 82.1 |
| 35 | 6 | 82.6 |
| 36 | 10 | 80.9 |
| 37 | 10 | 80.9 |
| 3 | 13 | 81.7 |
| 3 | 19 | 81.3 |
| 38 | 13 | 82.6 |
| 34 | 3 | 82.1 |
| 34 | 11 | 81.3 |

TABLE 9
Amino Acid Sequences of the Variable Region
Sequences of HC34-HC38

| | SEQ ID | |
|---|---|---|
| Name | NO: | Amino acid sequence |
| HC34 | 52 | EVQLVESGGGLVQPGGSLRLSCAASGFTFNTYAMNWVRQAPGKGLE |
| | | WVGRIRSKYNNYATYYAASVKGRFTISRDDSKNSLYLQMNSLKTED |
| | | TAMYYCVRHGNFGHSYVSWFAYWGQGTLVTVSS |
| HC35 | 734 | EVQLVESGGGLVQPGGSLRLSCAASGFTFNDYAMNWVRQAPGKGLE |
| | | WVGRTRSKYNNYATYYAASVKGRFTISRDDSKNSLYLQMNSLKTED |
| | | TAMYYCVRHGNFGHSYVSWFAYWGQGTLVTVSS |
| HC36 | 735 | EVQLVESGGGLVQPGGSLRLSCAASGFTFNDYAMNWVRQAPGKGLE |
| | | WVGRIRSKYNNYATYYAASVKGRFTISRDDSKNSLYLQMNSLKTED |
| | | TAMYYCVRHGNFGHSYVSWFAYWGQGTLVTVSS |
| HC37 | 736 | EVQLVESGGGLVQPGGSLRLSCAASGFTFNTYAMNWVRQAPGKGLE |
| | | WVGRTRSKYNNYATYYAASVKGRFTISRDDSKNSLYLQMNSLKTED |
| | | TAMYYCVRHGNFGHSYVSWFAYWGQGTLVTVSS |
| HC38 | 737 | EVQLVESGGGLVQPGGSLRLSCAASGFTFNDYAMNWVRQAPGKGLE |
| | | WVGRTRSKYNNYATYYADSVKGRFTISRDDSKNSLYLQMNSLRTED |
| | | TAVYYCVRHGNFGHSYVSWFAYWGQGTLVTVSS |

TABLE 10
Amino Acid Sequences of the Variable Region
Sequences of LC11-LC20

| | SEQ ID | |
|---|---|---|
| Name | NO: | Amino acid sequence |
| LC11 | 738 | QAVVTQEPSLTVSPGGTVTLTCGSSTGAVTTGHYANWVQQKPGQAP |
| | | RGLIGGTNKRAPGVPARFSGSLLGGKAALTLSGAQPEDEAEYYCAL |
| | | WYSNLWVFGGGTKLTVL |
| LC12 | 739 | QAVVTQPPSLTVSPGGTVTLTCGSSTGAVTTGHYANWVQQKPGQAP |
| | | RGLIGGTNKRAPWTPARFSGSLSGGKAALTISGAQPEDEAEYYCAL |
| | | WYSNRWVFGGGTKLTVL |
| LC13 | 56 | QAVVTQEPSLTVSPGGTVTLTCGSSTGAVTTGHYANWVQQKPGQAP |
| | | RGLIGGTSNRAPGVPARFSGSLLGGKAALTISGAQPEDEAEYYCAL |
| | | WYSNRWVFGGGTKLTVL |
| LC14 | 740 | QAVVTQPPSLTVSPGGTVTLTCGSSTGAVTTGHYANWVQQKPGQAP |
| | | RGLIGGTSNRAPGVPARFSGSLSGGKAALTISGAQPEDEAEYYCAL |
| | | WYSNRWVFGGGTKLTVL |
| LC15 | 741 | QAVVTQPPSLTVSPGGTVTLTCGSSTGAVTTGHYANWVQQKPGQAP |
| | | RGLIGGTNKRAPGVPARFSGSLSGGKAALTISGAQPEDEAEYYCAL |
| | | WYSARWVFGGGTKLTVL |
| LC16 | 742 | QAVVTQPPSLTVSPGGTVTLTCGSSTGAVTTGHYANWVQQKPGQAP |
| | | RGLIGGTSNRAPWTPARFSGSLSGGKAALTISGAQPEDEAEYYCAL |
| | | WYSNRWVFGGGTKLTVL |
| LC17 | 743 | QAVVTQPPSLTVSPGGTVTLTCGSSTGAVTTGHYANWVQQKPGQAP |
| | | RGLIGGTNKRAPWTPARFSGSLSGGKAALTISGAQPEDEAEYYCAL |
| | | WYSARWVFGGGTKLTVL |
| LC18 | 744 | QAVVTQPPSLTVSPGGTVTLTCGSSTGAVTTGHYANWVQQKPGQAP |
| | | RGLIGGTSNRAPWTPARFSGSLSGGKAALTISGAQPEDEAEYYCAL |
| | | WYSARWVFGGGTKLTVL |
| LC19 | 745 | QAVVTQEPSLTVSPGGTVTLTCGSSTGAVTTGHYANWVQQKPGQAP |
| | | RGLIGGTNKRAPGVPARFSGSLLGGKAALTISGAQPEDEAEYYCAL |
| | | WYSARWVFGGGTKLTVL |

[0435] The third round huSP34 variants were next generated as Fabs or incorporated into anti-HIV gp120 targeting bispecific antibodies. These molecules were then characterized in BLI (Example 5) and SPR (Example 6) affinity assays, BVP polyspecificity assays (Example 7), T-cell binding assays (Example 9) and non-human primate PK analysis (Example 13). The T-cell binding assays confirmed that binding to human and NHP T-cells was nearly identical among all variants tested (Example 9). Surprisingly, and in contrast to previous literature reports (Leong, et al., Blood (2017) 129:609-618), the results presented here demonstrate no relationship between CD3 affinity and antibody clearance. More specifically, huSP34.3.8 and its variant huSP34.3.13 had both the highest anti-CD3 affinities (Example 6) and longest serum half-life among all molecules tested (Example 13). The huSP34.3.13 variant had both the lowest polyspecificity risk and the lowest clearance, suggesting that the BVP score may be a better predictor of anti-CD3 bispecific mAb PK properties than anti-CD3 affinity.

### Example 2

### Design, Expression and Purification of Anti-HIV-Gp120 Bispecific Antibodies and Fc Fusion Proteins Containing huSP34 Anti-CD3 Binding Domains

[0436] Many different bispecific antibody formats have been described, with many of these being used to develop therapeutic molecules (reviewed in Spiess and Carter, Mol. Immunol., (2015) 67: 95-106, Labrijn, et al., Nat. Rev. Drug Disc. (2019) 18, 585-608). While early generation fragment-based formats built around one or two polypeptide chains and lacking an IgG Fc can be readily manufactured, they suffer from poor PK. Short half-life can increase the Cₘₐₓ driven toxicity of CD3 directed bispecific antibodies and necessitates complex dosing (e.g. continuous infusion with Blinatumomab). While many technologies have been developed to facilitate heterodimerization of the Fc domain, no robust technologies exist to facilitate unique pairing of the heavy chain and light chain, thus necessitating the use of common light chain antibodies (Shiraiwa, et al., Methods (2019) 154:10-20) or the generation of multiple stable cell lines followed by either complex redox chemistry, or co-culturing methods to produce bispecific antibodies without light chain miss-pairing (Gramer, et al., mAbs (2013) 5:962-973, Spiess, et al., Nat. Biotechnol. (2013) 31:753-758, Shatz, et al., mAbs (2016) 8:1487-1497). Finally, even if Fc heterodimerization and appropriate light chain pairing can be achieved, homodimeric contaminants can be challenging to remove during manufacturing, reducing final yields and/or presenting safety risks. We therefore sought to design and produce a bispecific antibody with IgG-like manufacturing properties, IgG-like PK properties and incorporating technologies to simplify purification. Examples of bispecific antibody designs that may address these challenges are illustrated in FIGS. 7A-7D. The technologies that may be incorporated into these designs are described below.

[0437] In bispecific antibodies incorporating two antigen targeting antibody variable domains, the use of a single chain fragment variable (scFv) domain can directly eliminate mispairing of light chains by removing one light chain polypeptide from the construct. scFv fragments represent a minimal antibody-derived antigen binding unit and are generated by direct fusion of a variable heavy and variable light domain via a flexible polypeptide linker (Huston et al., Proc Natl Acad Sci USA (1988) 85(16):5879-83). The sequence of this linker can contain 3 or preferably 4 repeats of a GGGGS motif (SEQ ID NO: 712) (Desplancq, et al., Protein Engineering (1994) 7:1027-1033). The G44C mutation (variable heavy domain) and the G100C mutation (variable light domain) may also be used to generate a covalent disulfide bond between the VH and VL domains of the scFv if additional thermodynamic stability is required (Brinkmann, et al., Proc Natl Acad Sci USA (1993) 90(16):7538-42).

[0438] To maximize heterodimerization of the two different heavy chain-containing species, so-called ‘knobs-into-holes’ mutations can be introduced into the Fc regions (Atwell, et al., J Mol Biol (1997) 270(1):26-35). The ‘hole’ mutations (T366S, L368A and Y407V) are incorporated into one Fc-containing chain, while the T366W ‘knob’ mutation is used in the other chain (Atwell, et al., supra). These mutations will also be referred to as “SAV” and “W” respectively herein. In addition, the C220S mutation is incorporated into the IgG1 hinge region of the scFv-containing arm to eliminate a free cysteine (in the context of a native IgG, this cysteine is responsible for forming a disulfide bond with a corresponding cysteine in the light chain). Co-transfection of such constructs leads to preferential formation of a heterodimeric Fc, with low levels of homodimer contaminants. The S354C (made in the Fc containing the ‘knob’ mutations) and Y349C (made in the Fc containing the ‘hole’ mutations) mutations may optionally be used to generate a covalent bond between the two halves of the heterodimeric Fe if additional thermodynamic stability is required (Merchant, et al., Nat. Biotechnol. (1998) 16: 677-81).

[0439] To facilitate purification of the heterodimeric molecule away from contaminating homodimeric products, the H435R or H435R+Y436F mutations found in IgG3 allotypes may be introduced in either of the Fc-containing chains (Jendeberg, et al., supra). These mutations, which will be referred to as “R” or “RF” respectively, eliminate Protein A and FcRn binding when introduced in to the IgG1 Fc. When incorporated into only a single Fc domain in the context of a bispecific antibody construct, these mutations can eliminate Protein A binding of any homodimer contaminant containing these mutations, and greatly simplifies purification of the desired heterodimer away from the single remaining homodimer contaminant via additional chromatography steps (e.g. ion exchange). If one of the antibody variable domains is a VH3 family member (known to bind Protein A in addition to the Fc), additional engineering can be conducted to remove residual VH3 Protein A binding (Example 3).

[0440] Technologies to enhance PK half-life of IgG antibodies can be introduced into bispecific antibodies including Fc mutations such as M428L+N434S (LS) or M252Y+S254T+T256E (YTE) that improve pH dependent binding to FcRn and have been shown to significantly improve antibody half-life (Zalevsky, et al., Nat. Biotechnol. (2010) 28:157-159; Dall'Acqua, et al., J. Biol. Chem. (2006) 281:23514-23524). In the context of a bispecific antibody, and in particular a bispecific antibody containing mutations to knock out Fc Protein A binding (which also reduce FcRn binding), the LS or YTE mutations may only be introduced into the Fc polypeptide lacking the Protein A binding knockout mutations.

[0441] Many applications of bispecific antibodies require that the Fc domain is devoid of effector function (ADCC, ADCP, CDC). In these contexts, the L234A and L235A mutations to reduce or eliminate FcγR binding (Chappel, et al., Proc Nat Acad Sci USA (1991) 88(20):9036-40), and the P331S mutations to reduce or eliminate C1q binding (Xu, et al., J Biol Chem. (1994) 269:3469-74) may be used. This set of mutations will be referred to as “AAS” herein.

[0442] To express the anti-HIV gp120 bispecific antibodies described herein (FIG. 7A), the VH coding sequences of anti-HIV gp120 broadly neutralizing antibody variants were codon-biased for improved Homo sapiens expression and cloned into pcDNA3.1 vector containing immunoglobulin Fe (CH1-CH3) with AAS, SAV, W, R or RF mutations in various combinations (HC1). Broadly neutralizing antibody variable domains used include PGT121.66 and PGT121.42 (described in WO2018237148) and 3BNC117 1.52.64-1 (described in WO2020010107). Codon-biased VL sequences were cloned into pcDNA3.1 vector containing human light chain constant region (LC). The VH and VL coding sequences of various huSP34 variants connected by four repeats of G4S linker (GGGGS)₄ (SEQ ID NO: 750) were cloned into pcDNA3.1 vector containing the immunoglobulin Fc (CH2-CH3) containing AAS, SAV, W, R or RF mutations in various combinations (HC2). Transfection of Expi293 cells was conducted according to manufacturer's protocol. One microgram total DNA was used per ml transfection. The plasmids were combined in a ratio of 25% HC1:50% LC: 25% HC2 (w/w) when co-transfecting into Expi293 cells. Four days post-transfection, the cell-free culture media was harvested. Expression titer was determined by using PhyTips® harboring 20 μl of MabSelect™ SuRe™ resin using 200 μl of clarified supernatant. Formation of heterodimer was monitored by size fractionation on SDS/polyacrylamide gel electrophoresis.

[0443] Extracellular domains 1 and 2 (D1D2) of the human CD4 protein bind HIV gp120, and when fused to Fc domains or incorporated into engineered T-cells, also have the ability to neutralize HIV and/or kill HIV infected cells (see, e.g., Capon, et al., Nature (1989) 337(6207):525-31; Zhen, et al., PLoS Pathog (2017) 13(12):e1006753: Leibman, et al., PLoS Pathog. (2017) 13(10):e1006613; Carillo, et al, Transl Res. (2017) 187:83-92; Kamata, et al., Biochem Biophys Res Commun. (2015) 463(3):216-21; Liu, et al., J Virol. (2015) 89(13):6685-94; Sahu, et al., Virology. (2013) 446(1-2):268-75; Scholler, et al., Sci Transl Med. (2012) 4(132):132ra53). Derivatives of CD4 have demonstrated broad antiviral activity. For example, PR0542 is a tetravalent CD4-IgG2 fusion that contains extracellular domains 1 and 2 of CD4. PR0542 exhibited potent, broad antiviral activity across different HIV clades (A-F) in vitro (Trkola, et al., J Virol. (1998) 72(3):1876-85; Trkola, et al., J Virol. (1995) 69(11):6609-17) and demonstrated antiviral activity in the clinic (Jacobson J M, 2000). However, protein therapeutics incorporating CD4 D1D2 have also demonstrated poor PK properties, hypothesized to be a result of either MHCII binding or polyspecificity (Chen, et al., J Virol. (2014) 88(2):1125-39). Recent work has identified an engineered CD4 domain known as CD4 D1.22 that has been improved for higher gp120 binding affinity and reduced polyspecificity (Chen, et al., J Virol (2011) 85(18):9395-405; Chen, et al., J Virol. (2014) 88(2):1125-39; Myszka, et al., Proc Natl Acad Sci USA (2000) 97(16):9026-31). A greater than 10-fold increase in HIV gp120 binding affinity was reported for CD4 D1.22 compared to wild-type 2 domain CD4 (D1D2) (Chen, et al., J Virol (2011) supra). In addition, CD4 D1.22 exhibited reduced non-specific binding to an MHC class II expressing B-cells compared to wild-type CD4 (D1D2) (Chen, et al., J Virol. (2014) supra). To understand if CD4 D1D2 or CD4 D1.22 could serve as an HIV targeting domain, we next designed, expressed and purified a panel of bispecific fusion proteins incorporating huSP34 scFv or Fab variants fused to a first Fc domain and CD4 D1D2 or CD4 D1.22 extracellular domains (ECDs) fused to a second Fc domain. Versions with monovalent, bivalent and tandem CD4 ECD domains (FIGS. 7B-7D) were screened in CD3 binding assays (Example 6), infected T cell killing and binding assays (Examples 10 and 11) and their PK were assessed in NHPs (Example 13).

[0444] To express the anti-HIV-gp120 ECD-Fc bispecific fusion constructs described herein (FIGS. 7B-7D), the CD4 D1.22 or CD4 D1-D2 coding sequence was cloned into pcDNA3.1 expression vector carrying an immunoglobulin Fc (CH2-CH3) with AAS, SAV, W, R or RF mutations in various combinations (HC1). The VH coding sequences of humanized SP34 variants were codon-biased for Homo sapiens expression and cloned into pcDNA3.1 containing an immunoglobulin Fc (CH1-CH3) with AAS, SAV, W, R or RF mutations in various combinations (HC2). Codon-biased of humanized SP34 variant VL sequences were cloned into pcDNA3.1 vector containing human lambda light chain (LC). In some cases, the VH and VL coding sequence connected by four repeats of G4S linker (GGGGS)₄ (SEQ ID NO: 750) was cloned into pcDNA3.1 vector containing the immunoglobulin CH2-CH3 Fc with AAS, SAV, W, R or RF mutations (HC2′). Transfection of Expi293 cells was conducted according to manufacturer's protocol. One microgram total DNA was used per ml transfection. The plasmids were combined in a ratio of 25% HC1:50% LC: 25% HC2 (w/w) or 50% HC1:50% HC2′ (w/w) when co-transfecting into Expi293 cells. Four days post-transfection, the cell-free culture media was harvested. Expression titer was determined by using PhyTips® harboring 20 μl of MabSelect™ SuRe™ resin using 200 μl of clarified supernatant. Formation of heterodimer is monitored by size fractionation on SDS/polyacrylamide gel electrophoresis.

[0445] To purify the bispecific antibody and protein fusion constructs described herein, culture supernatant was subjected to MabSelect™ SuRe™ affinity purification followed by ion exchange chromatography to isolate pure heterodimers using an AKTA FPLC (Cytiva Life Sciences) enclosed within a 4.0° C. chromatography chamber. Cell culture media was loaded onto a MabSelect™ SuRe™ (Cytiva Life Sciences) column. The column was washed with a low salt buffer of 25 mM Tris HCl pH 7.5, 25 mM NaCl for 10 column volumes (CV), then with a high salt buffer of 25 mM Tris HCl pH 7.5, 500 mM NaCl for 5 CV to remove non-specific binding, and finally with a low salt wash of 25 mM Tris HCl pH 7.5, 25 mM NaCl for 10 CV. To elute the antibody, an isocratic elution step of 100 mM Sodium Acetate pH 3.7 (used with Protein A knockout mutation in huSP34 VH and Fc) or 100 mM Glycine pH 2.8 (used when no Protein A knockout mutations are present in huSP34 VH and Fc) was used. The eluted pool was neutralized to pH 6.0 with 1M Tris HCl pH 9.0, and subjected to a cation ion purification, HiTrap® SP HP (Cytiva Life Sciences) to further remove impurities. The cation captured protein was washed with 10 mM Sodium Phosphate pH 7.0 for 10 CV, then eluted in 0-30% gradient of 10 mM Sodium Phosphate pH 7.0, 1M NaCl for 50 CV to separate the desired bispecific antibody or fusion protein Fc heterodimer from Fc homodimer or other contaminants with low isoelectric points (pI). Then the cation captured protein was subjected to gradient elution from 30-100% of 10 mM Sodium Phosphate pH 7.0, 1M NaCl for 10 CV to separate the desired bispecific antibody or fusion protein Fc heterodimer from Fc homodimer contaminants with high isoelectric points (pI) or from aggregates. Fractions representing the desired antibody heterodimer were then pooled and dialyzed in 20 mM Histidine pH 5.8, supplemented with sucrose/tween-80, sterile filtered, and stored at 4° C. Concentration of the formulated protein was determined using UV absorbance at 280 nM (A280). Purity was assessed by analytical size-exclusion chromatography and SDS-PAGE electrophoresis. Identity of the bispecific antibody was confirmed by Mass Spec (MS).

[0446] Examples of HiTrap® SP HP (Cytiva Life Sciences) cation exchange chromatography profiles and SDS-PAGE purity analysis for anti-gp120 bispecific antibodies and anti-gp120 bispecific Fc fusion proteins are shown in FIGS. 8A-8B. These results demonstrate that pure bispecific antibodies and Fc fusion proteins can be expressed and purified using the designs and methods described herein (e.g., HiTrap® SP HP (Cytiva Life Sciences) where cation exchange chromatography successfully isolated the desired bispecific antibody or fusion protein Fc heterodimer from Fc homodimer or other contaminants with low isoelectric points (pI) using a gradient of 0-30% 1M NaCl in 20 mM sodium phosphate pH 7.0).

### Example 3

### Engineering Humanized SP34 Antibody Variable Domains that do not Bind Protein A

[0447] Protein A affinity chromatography is commonly used to purify human IgGs for both research and therapeutic applications (Shukla, et al., J, Chromatogr. B Analyt. Technol. Biomed. Life Sci. (2007) 848:29-39). This method takes advantage of Staphylococcus aureus Protein A, which binds with high affinity to IgG1 Fc domains at neutral pH but not at acidic pH, thus allowing capture of IgGs from cellular supernatants, and elution of purified IgG using acidic buffers. In addition to its interaction with the Fc domain of IgGs, Protein A can bind to a subset of VH3 derived human variable domains. In some cases, VH3 derived antibodies may require harsher and more acidic elution buffers to be eluted from Protein A, which may destabilize the structure of the antibody, lead to aggregation and/or precipitation and reductions in overall yield. While engineered variants of Protein A, such as those used in MabSelect™ Sure™ resin, have reduced affinity to VH3 domains, some VH3 domains are still capable of binding this resin (Bach, et al., Journal of Chromatography A. (2015) 1409:60-69).

[0448] In certain embodiments of the bispecific antigen binding molecules described herein, the H435R (R) or the H435R+Y436F (RF) mutation is incorporated into the CH3 domain of one heavy chain, but not the other. As a result, the bispecific heterodimer retains binding to Protein A, while one of the two possible homodimeric contaminants does not bind Protein A, and is thus eliminated during purification. However, residual Protein A binding, present in a VH3 domain fused to an H435R containing CH3 domain, could cause such a homodimeric contaminant to bind Protein A, and obviate the utility of the H435R mutation.

[0449] To minimize or eliminate residual binding of the humanized anti-CD3 VH3 domain to Protein A, we used structural modeling to design a series of single- and double-point mutants predicted to reduce or eliminate Protein A binding. A homology model of huSP34.13.18 (made using the default antibody homology modeling protocols in Discovery Studio 2017r2), a structure of Protein A bound to a VH3 domain (PDB: 1DEE), as well as the sequence of the engineered Protein A Z domain found in MabSelect™ Sure™ (Nilsson, et al., Protein Engineering (1987) 1:107-113) were used to generate a model of huSP34.13.8 bound to the Protein A Z domain. Next, we examined the interface between the Z domain and huSP34.13.8 in order to identify residues potentially contributing to Protein A binding. Based on this analysis, we selected residues S17, R19, T57, Y59, G65, T68, S70, Q81, N82a and S82b for further analysis. A variety of mutations at each position were initially tested for their ability to disrupt binding to Protein A in-silico using default protocols in Discovery Studio 2017r2. Mutations selected for further experimental analysis were predicted to increase the binding free energy between the Z-domain and huSP34.13.8 Fv.

[0450] We next conducted small scale Protein A purifications on huSP34.13.8 and the designed variants, all fused to an Fc containing the H435R mutation. 5 g of the DNA encoding the scFv-Fc constructs was transfected into 5 ml of Expi293 cells according to manufacturer's protocol. Clarified supernatant of each transfection was collected 4 days post-transfection. 15 μl of supernatant was saved for gel loading. scFv-Fc protein was purified from 200 μl of supernatant using 20 μl Protein A resin in PhyTips® over Bravo Liquid Handling platform. Captured proteins on PhyTips® were washed 3× with 1×PBS prior to elution using 60 μl of 100 mM sodium acetate pH 3.7. 30 μl of each elution was fractionated over a 12-well 4-20% Criterion TGX Stain-free gel well and imaged. Relative intensity of the homodimer band of various scFv-Fc variants was quantified using Bio-Rad Image Lab™ 6.0 software. Relative binding of each variant to Protein A was normalized to the band intensity of the parental scFv (huSP34.13.8 scFv-AAS+SAV+R) and is shown in Table 11.

TABLE 11
Relative Protein A Binding of First
Round huSP34.13.8scFv-Fc Variants

| | | % normalized |
|---|---|---|
| | Amino Acid | binding to |
| Name | Substitutions | ProA resin |
| huSP34.14.8 scFv AAS + SAV + R | R19S | 0.8 |
| huSP34.15.8 scFv AAS + SAV + R | T57A | 10.9 |
| huSP34.16.8 scFv AAS + SAV + R | T57E | 0.4 |
| huSP34.17.8 scFv AAS + SAV + R | G65S | 7.9 |
| huSP34.18.8 scFv AAS + SAV + R | G65T | 6.3 |
| huSP34.19.8 scFv AAS + SAV + R | Q81E | 1.4 |
| huSP34.20.8 scFv AAS + SAV + R | Q81T | 10.5 |
| huSP34.21.8 scFv AAS + SAV + R | N82aS | 19.4 |
| huSP34.22.8 scFv AAS + SAV + R | N82aR | 1.6 |
| huSP34.23.8 scFv AAS + SAV + R | R19K, Q81E | 1.3 |
| huSP34.24.8 scFv AAS + SAV + R | Q81E, N82aS | 1.1 |
| huSP34.25.8 scFv AAS + SAV + R | T57A, G65S | 0.3 |
| huSP34.13.8 scFv AAS + SAV + R | parent | 100 |

[0451] All variants demonstrated reduced binding to Protein A, although some were much more effective and led to near complete loss of retention during Protein A chromatography. Based on these data, a series of double mutants, e.g., R19S and T57A; R19S and T57E; R19S and G65S; R19S and Q81E; T57A and Q81E; T57E and G65S; T57E and Q81E; and G65S and Q81E, were generated to further reduce or eliminate binding of the anti-CD3 binding VH domain to Protein A. Results are provided in Table 12.

TABLE 12
Protein A Binding of Second Round huSP34.13.8scFv-Fc
Homodimer Variants

| | | % normalized |
|---|---|---|
| | Amino Acid | binding to |
| Name | Substitutions | ProA resin |
| huSP34.26.8 scFv AAS + SAV + R | R19S, T57A | 0.41 |
| huSP34.27.8 scFv AAS + SAV + R | R19S, T57E | 0.29 |
| huSP34.28.8 scFv AAS + SAV + R | R19S, G65S | 0.38 |
| huSP34.29.8 scFv AAS + SAV + R | R19S, Q81E | 1.55 |
| huSP34.30.8 scFv AAS + SAV + R | T57A, Q81E | 1.75 |
| huSP34.31.8 scFv AAS + SAV + R | T57E, G65S | 1.57 |
| huSP34.32.8 scFv AAS + SAV + R | T57E, Q81E | 2.91 |
| huSP34.33.8 scFv AAS + SAV + R | G65S, Q81E | 0.31 |
| huSP34.25.8 scFv AAS + SAV + R | T57A, G65S | 0.45 |
| huSP34.13.8 scFv AAS + SAV + R | Parent | 100 |

[0452] Next, a selection of variant huSP34 scFv-Fc fusion proteins containing one or two VH region mutations along with the unmutated control were expressed at larger scale to increase the relative loading concentration on the Protein A resin and thus increase the stringency of the Protein A knockout screen. 500 ml of Expi293 cells were transfected with 0.5 mg DNA encoding selected huSP34 scFv-Fc Protein A knockout variants according to manufacturer's protocol. Four days post transfection, the cell-free clarified supernatant was collected and loaded to a MabSelect™ SuRe™ (Cytiva Life Sciences) column. Afterwards the column was washed with a low salt buffer of 25 mM Tris HCl pH 7.5, 25 mM NaCl for column volumes (CV), then high salt wash of 25 mM Tris HCl pH 7.5, 500 mM NaCl for 5 CV to remove non-specific binding, and finally washed with a low salt wash of 25 mM Tris HCl pH 7.5, 25 mM NaCl for 10 CV. To elute the antibody, an isocratic elution step of 100 mM sodium acetate pH 3.7 was performed. The eluted pool was neutralized to pH 6.0 with 1 M Tris HCl pH 9.0, and subjected to a cation ion purification, HiTrap SP HP (Cytiva Life Sciences) to further remove impurities. The cation captured protein was washed with 10 mM sodium phosphate pH 7.0 for 10 CV, then eluted in 0-30% gradient of 10 mM sodium phosphate pH 7.0, 1M NaCl for 50 CV to separate the desired two targeting arm antibody (heterodimer) from the one targeted arm antibody (homodimer). Followed with gradient elution from 30-100% of 10 mM sodium phosphate pH 7.0, 1 M NaCl for 10 CV to remove aggregation or homodimer in higher isoelectric point (pI). All proteins were formulated into 20 mM histidine pH 5.8 by dialysis, added additive of sucrose/tween-80, sterile filtered, and stored at 4° C. Concentration of the formulated protein was measured by A280. Purity was assessed as percent monodispersed by analytical size-exclusion chromatography. Identity of the bispecific antibody was determined by Mass Spec (MS). The three VH-region variants with the lowest residual Protein A binding, along with the parental construct were further scaled up as anti-gp120 bispecific antibodies and final yield was assessed. The results of this work are shown in Table 13.

TABLE 13
Protein A Binding of huSP34.13.8scFv-Fc Protein A Knockout Homodimer Variants

| | | scFv-Fc Homodimer | PGT121.66 |
|---|---|---|---|
| | | Yield Relative to WT | Bispecific |
| Name | Mutant | (e.g. Protein A binding) | Antibody Yield |
| huSP34.13.8 scFv AAS + SAV + R | Parent | 100% | 178 mg/L |
| huSP34.14.8 scFv AAS + SAV + R | R19S | 21% | n.d.* |
| huSP34.19.8 scFv AAS + SAV + R | Q81E | 86% | n.d. |
| huSP34.25.8 scFv AAS + SAV + R | T57A + G65S | 1% | 165 mg/L |
| huSP34.26.8 scFv AAS + SAV + R | R19S + T57A | 8% | n.d. |
| huSP34.27.8 scFv AAS + SAV + R | R19S + T57E | 8% | n.d. |
| huSP34.28.8 scFv AAS + SAV + R | R19S + G65S | 1.50% | 151 mg/L |
| huSP34.33.8 scFv AAS + SAV + R | G65S + Q81E | 0.70% | 122 mg/L |

*n.d.—not determined

[0453] The top three mutants were incorporated into the background of anti-gp120 bispecific antibodies and CD4 ECD-Fc fusions built around the huSP34.3.13 variant. BLI and SPR analysis confirmed that these mutations did not impact anti-CD3 affinity (Examples 6), however BVP (Example 7) and PK analysis revealed distinct differences among the various bispecific antibodies tested (Example 13).

### Example 4

### Expression, Purification and Biophysical Assessment of huSP34 Fab and IgG Variants

[0454] For Fab production, the VH coding sequences of mSP34, huSP34 variants and comparator molecules were codon-optimized for Homo sapiens expression and cloned into pcDNA3.1 vector containing CH1 domain of human IgG1 followed by a C-terminal His8-FLAG tag (His8 or HHHHHHHH disclosed as SEQ ID NO: 1041). Codon-optimized VL sequences were cloned into pcDNA3.1 vector with CL domain of human lambda light chain. Expi293 cells transfection was conducted according to manufacturer's protocol. One microgram total DNA was used per ml of transfection. Expression vectors encoding the heavy and light chain were mixed in a DNA ratio of 2:3 (w:w) respectively before addition to diluted Expifectamine reagent. After incubation at room temperature for 20 minutes, the DNA transfection complex was added to Expi293 cells at 3 million per ml. Four days post-transfection, the clarified supernatant was harvested. Fabs were purified using Ni-IMAC PhyTips® on Hamilton Star Liquid Handling platform. Fabs bound were eluted from Ni-IMAC resin with 250 mM imidazole-containing 25 mM Tris, pH 8 and 300 mM NaCl and quantified by absorbance measurement at A280 using Nanodrop after blanking with elution buffer. Concentration of each Fab recovered was determined by dividing the A280 reading with the respective extinction coefficient. Expression titer (mg/L) was calculated as follows: [(Concentration (mg/ml)×volume of eluate (ml)*1000]/30 ml. The expression titers of mSP34 and comparator #6 were 58 mg/L and 128 mg/L respectively, while the value for the first round of huSP34 Fabs is shown in Table 14. Heavy chains 6 and 8 were associated with huSP34 variants that had the highest levels of expression.

TABLE 14
Expression Titer of First Round huSP34 Fabs in mg/L

| | HC1 | HC2 | HC3 | HC4 | HC5 | HC6 | HC7 | HC8 | HC9 | HC10 |
|---|---|---|---|---|---|---|---|---|---|---|
| LC1 | 114 | 102 | 60 | 85 | 94 | 179 | 97 | 168 | 95 | 15 |
| LC2 | 92 | 147 | 67 | 78 | 47 | 154 | 101 | 165 | 115 | 85 |
| LC3 | 82 | 93 | 90 | 87 | 96 | 113 | 97 | 208 | 115 | 122 |
| LC4 | 97 | 97 | 92 | 88 | 73 | 108 | 43 | 141 | 69 | 100 |
| LC5 | 91 | 105 | 85 | 74 | 76 | 140 | 80 | 104 | 66 | 81 |
| LC6 | 97 | 105 | 87 | 92 | 79 | 97 | 88 | 82 | 76 | 87 |

[0455] Based in part on these results, a second round of humanized SP34 variants was designed. The expression titers of comparator #1 and comparator #5 Fabs were 80 mg/mL and 184 mg/mL respectively, while the values for the second round of huSP34 Fabs is shown in Table 15. Heavy chains 12 and 13 were associated with the highest expression titers, while heavy chain 3 was associated with the lowest expression titers.

TABLE 15
Expression Titer of Second Round huSP34 Fabs in mg/L

| | HC3 | HC11 | HC12 | HC13 |
|---|---|---|---|---|
| LC7 | 105 | 124 | 137 | 137 |
| LC8 | 87 | 107 | 133 | 118 |
| LC9 | 95 | 116 | 143 | 154 |
| LC10 | 78 | 96 | 112 | 108 |

[0456] For production of huSP34 variants as human IgG1 antibodies, the VH and VL coding sequences of humanized SP34 variants were cloned into pcDNA3.1 vector containing immunoglobulin isotype 1 Fc and human lambda constant region sequence respectively. Transfection of Expi293 cells was performed according to manufacturer's protocol. One (1) microgram total DNA was used per ml of transfection. The DNA was combined in a ratio of 60% LC to 40% HC with diluted Expifectamine® reagent before addition to cells. Four days post-transfection, the cell-free culture media was purified using MabSelect™ SuRe™ resin embedded PhyTips® on Hamilton Star Liquid Handling platform. Bound IgG was eluted from the tips using 100 mM sodium acetate pH 3.7 and neutralized by the addition of 1/10th volume of 1M Tris pH 9.0. Eluted IgG was quantified by absorbance measurement at A280 using Nanodrop after blanking with elution buffer. Concentration of each IgG recovered was determined by dividing the A280 reading with the respective extinction coefficient. Expression titer (mg/L) was calculated as follows: [(Concentration (mg/ml)×volume of eluate (ml)*1000]/30 ml (transfected volume).

[0457] The expression titer of huSP34 IgG1 variants (n=1) is shown in Table 16. All huSP34 IgG1 variants show reduced expression titer relative to comparator #1 (121 mg/L, n=2).

TABLE 16
Expression Titer of huSP34 IgGs in mg/L

| | HC1 | HC2 | HC4 | HC3 | HC11 | HC12 | HC13 |
|---|---|---|---|---|---|---|---|
| LC1 | 72 | 74 | 117 | 125 | n.d.* | n.d. | n.d. |
| LC3 | 100 | 168 | 147 | 103 | n.d. | n.d. | n.d. |
| LC6 | 93 | 134 | 125 | 115 | n.d. | n.d. | n.d. |
| LC7 | n.d. | n.d. | n.d. | 135 | 69 | 126 | 143 |
| LC8 | n.d. | n.d. | n.d. | 47 | 103 | 87 | 108 |
| LC9 | n.d. | n.d. | n.d. | 100 | 140 | 108 | 156 |
| LC10 | n.d. | n.d. | n.d. | 98 | 74 | 58 | 69 |

*n.d. not determined

[0458] Purified huSP34 variant samples were analyzed via analytical size exclusion chromatography (SEC) to determine aggregate levels. All analyses were run on an Agilent 1200 HPLC system using a Shodex LW-803, 8×300 mm, 3-micron column. The resin within the column has spherical beads containing pores of a specific size distribution. Separation occurs when molecules of different sizes are included or excluded from the pores within the matrix. The mobile phase was 200 mM KPO₄, 25 mM KCl, pH 6.0, and the column was run at a 0.5 mL/min flow rate. Protein detection was accomplished via OD280 detection, and a calibration run was performed using Bio-Rad SEC standards to ensure correct separation of proteins with different molecular weights. A nominal injection amount was set at 20 g of test protein and the total area of each eluted protein-containing peak was calculated. From these data, the SEC purity of each sample was defined as the percentage of monomeric Fab material, this calculated by dividing the area of the monomer-containing peak by the combined area of this peak plus any earlier-eluting aggregate-containing peaks (no later eluting peaks containing protein were observed).

[0459] The average (n=2) SEC purity for mSP34 and comparator #6 were 81% and 84% respectively, while the value (n=1) for each huSP34 Fab is shown in Table 17. The SEC purity of the first round huSP34 Fabs ranged from 75% to 92%. Heavy chains 1, 2, 4, 5 and 8 were associated with the lowest levels of aggregation, while light chain 6 was associated with the highest levels of aggregation. Interestingly, heavy chain 2 (HC2) was associated with the lowest levels of aggregation when paired with all light chain variants tested.

TABLE 17
SEC Purity (%) of First Round huSP34 Fabs.

| | HC1 | HC2 | HC3 | HC4 | HC5 | HC6 | HC7 | HC8 | HC9 | HC10 |
|---|---|---|---|---|---|---|---|---|---|---|
| LC1 | 89 | 89 | 78 | 86 | 87 | 83 | 84 | 90 | 80 | n.d |
| LC2 | 90 | 92 | 85 | 87 | 87 | 86 | 87 | 89 | 86 | 80 |
| LC3 | 83 | 85 | 81 | 84 | 85 | 83 | 85 | 87 | 86 | 83 |
| LC4 | 83 | 85 | 82 | 81 | 82 | 82 | 77 | 82 | 79 | 83 |
| LC5 | 84 | 89 | 85 | 84 | 75 | 84 | 77 | 85 | 75 | 82 |
| LC6 | 79 | 85 | 79 | 83 | 78 | 84 | 81 | 79 | 82 | 81 |

*n.d. = not determined

[0460] The SEC results for the second round of huSP34 Fabs are shown in Table 18. All second round huSP34 Fabs show improved % monodispersion values when compared to the first round huSP34 Fabs and were similar to the comparator #5 (97.4%) Fab.

TABLE 18
SEC Purity (%) of Second Round huSP34 Fabs.

| | HC3 | HC11 | HC12 | HC13 |
|---|---|---|---|---|
| LC7 | 98.1 | 97.1 | 97.7 | 97.2 |
| LC8 | 97.7 | 97.7 | 97.5 | 97.1 |
| LC9 | 97.3 | 97.6 | 98 | 97.2 |
| LC10 | 97.4 | 96.9 | 96.8 | 96.9 |

[0461] The SEC results for the huSP34 IgG1 molecules are shown in Table 19. All of the huSP34 IgG1 antibodies displayed a high degree of purify with aggregation levels <6%. Heavy chain 3 (HC3) is associated with the lowest levels of aggregation.

TABLE 19
SEC Purity (%) of huSP34 IgGs

| | HC1 | HC2 | HC4 | HC3 | HC11 | HC12 | HC13 |
|---|---|---|---|---|---|---|---|
| LC1 | 96.0 | 94.5 | 94.8 | 96.6 | n.d.* | n.d. | n.d. |
| LC3 | 95.7 | 95.0 | 94.4 | 96.6 | n.d. | n.d. | n.d. |
| LC6 | 94.6 | 95.2 | 93.5 | 95.3 | n.d. | n.d. | n.d. |
| LC7 | n.d. | n.d. | n.d. | 97.3 | n.d | 96.2 | 95.3 |
| LC8 | n.d. | n.d. | n.d. | 95.8 | 96.4 | 95.8 | 96.1 |
| LC9 | n.d. | n.d. | n.d. | 96.1 | 97.4 | 95.1 | 96.5 |
| LC10 | n.d. | n.d. | n.d. | 96.9 | 96.5 | 94.4 | 96.1 |

*n.d. = not determined

[0462] To determine the charge heterogeneity of purified huSP34 Fabs and identify any mutations associated with potential sequence liabilities, we conducted strong cation exchange chromatography. All analysis was run on an Agilent 1200 HPLC system using a MabPac™ SCX 4×50 mm, 5 m strong cation exchange column (Thermo Scientific) at 30° C. A short analytical scale CX-1 method was run according to the manufacture's guidelines using their proprietary mobile phase known as “CX-1 pH gradient buffer” which is designed to generate a linear pH. The buffers were provided as a 10× concentrate and diluted at the time of use with deionized sterile water. Buffer A is pH 5.6; Buffer B is pH 10.2. A nominal injection amount was set at 20 g of test protein.

[0463] The following gradient was used: 0-1 min at 0.5 ml/min 0% B, 1-16 min 0-100% B, 18.7-19.5 min 0% B, 23 min 0% B. When the resulting OD280 vs volume chromatograph has a correctly drawn baseline, the protein peaks can be correctly annotated. From the chromatographic profile for each sample, the total area of each peak was calculated and the percentage of the main peak relative to total (% main peak) was determined. Impurities in humanized SP34 samples were predominantly earlier eluting than the main peak and were thus considered acidic in nature.

[0464] The percent main peak of each huSP34 Fab obtained from the analytical CX-1 analysis is presented in Table 20. The values for the first round huSP34 Fabs ranged from 66.8% to 90.6%, while the mSP34 Fab gave a value of 90.9% and comparator #6 gave a value of 83.1%. Fabs having heavy chain 6 (HC6) had substantially lower percent main peak than the other heavy chains, while Fabs containing heavy chain 4 (HC4) had the highest percent main peak. To identify mutations associated with reduced acidic species (higher percentage in the main peak), we next compared the dataset in Table 20, with the heavy chain variable domain sequences shown in FIG. 4B. Pairwise comparisons, sequence liability analysis and structural analysis were used to identify mutations that play a role in huSP34 charge heterogeneity. Heavy chain residues showing strong associations with higher percent main peak values include S30, D73, V89 and H100, while N30, N73, M89 and N100 were associated with reduced main peak values and an increase in acidic variants. Among these residues, H100 appeared most strongly associated with reduced levels of acidic variants (FIG. 9), consistent with the prediction that it removes a solvent exposed deamidation motif at the tip of heavy chain CDR3 (FIGS. 1-2). Based on this analysis, D73 and H100 were held constant during the second round of humanization.

TABLE 20
Percent Main Peak, CX-1 Ion Exchange Analysis of First Round huSP34 Fab.

| | HC1 | HC2 | HC3 | HC4 | HC5 | HC6 | HC7 | HC8 | HC9 | HC10 |
|---|---|---|---|---|---|---|---|---|---|---|
| LC1 | 74.6 | 79.5 | 83.6 | 86.0 | 84.8 | 70.6 | 84.5 | 71.7 | 85.2 | n.d.* |
| LC2 | 80.9 | 85.5 | 89.6 | 90.6 | 88.7 | 73.6 | 82.8 | 87.8 | 75.3 | 70.0 |
| LC3 | 73.5 | 77.1 | 80.9 | 85.7 | 84.9 | 72.2 | 84.8 | 86.2 | 79.8 | 85.2 |
| LC4 | 72.1 | 77.2 | 81.4 | 86.6 | 83.5 | 69.5 | 77.7 | 78.6 | 77.4 | 85.2 |
| LC5 | 77.1 | 84.1 | 85.5 | 89.1 | 78.8 | 70.2 | 72.6 | 88.4 | 72.4 | 82.3 |
| LC6 | 82.0 | 77.1 | 85.3 | 86.5 | 78.7 | 66.8 | 79.3 | 85.1 | 79.6 | 82.2 |

*n.d. = not determined

[0465] The analytical scale CX-1 results for the second round of huSP34 Fabs are shown in Table 21. Many of the second round huSP34 Fabs show improved % main peak values when compared to the first round huSP34 Fabs and were more similar to the comparator #5 (99.3%) Fab. Heavy chain 3 was associated with the highest percent main peak values, with the exception of the HC3+LC7 pair which was among the lowest.

TABLE 21
Percent Main Peak, CX-1 Ion Exchange
Analysis of Second Round huSP34 Fabs

| | HC3 | HC11 | HC12 | HC13 |
|---|---|---|---|---|
| LC7 | 89.9 | 92.7 | 91.3 | 90.6 |
| LC8 | 92.4 | 90.4 | 90.8 | 90.8 |
| LC9 | 93.4 | 90.8 | 91.1 | 90.1 |
| LC10 | 92.2 | 90.3 | 91.1 | 91.1 |

[0466] The huSP34 IgG molecules were also analyzed using analytical scale CX-1 ion exchange, and the results are shown in Table 22. The results align with those of the huSP34 Fabs, demonstrating that variants from the second round of humanization (HC3, HC11-13 and LC7-10) demonstrate significant improvements in product homogeneity when compared to variants from the first round of humanization (HC1-4 and LC1-6).

TABLE 22
Percent Main Peak, CX-1 Ion Exchange Analysis of huSP34 IgGs

| | HC1 | HC2 | HC4 | HC3 | HC11 | HC12 | HC13 |
|---|---|---|---|---|---|---|---|
| LC1 | 76.3 | 84.6 | 82.3 | 79.9 | n.d.* | n.d. | n.d. |
| LC3 | 78.2 | 82.1 | 85.2 | 80.1 | n.d. | n.d. | n.d. |
| LC6 | 89.9 | 80.1 | 79.7 | 88.2 | n.d. | n.d. | n.d. |
| LC7 | n.d. | n.d. | n.d. | 86.8 | 93.4 | 88.2 | 89.2 |
| LC8 | n.d. | n.d. | n.d. | 89.9 | 86.5 | 86.6 | 86.1 |
| LC9 | n.d. | n.d. | n.d. | 90.4 | 87.1 | 86.2 | 85.8 |
| LC10 | n.d. | n.d. | n.d. | 87.7 | 82.3 | 83.6 | 86.3 |

*n.d. = not determined

[0467] To characterize the thermodynamic stability of huSP34 variants we assessed the experimental thermal melting point and the onset of aggregation of the purified Fabs using the UNcle system (Unchained Labs) in a single analytical process. A 9 μl protein sample was prepared in triplicate in formulation buffer (95 mM NaAcetate 50 mM Tris, pH 6.0) at a concentration between 0.1-150 mg/ml. The protocol used for this analysis has a thermal ramp set to 0.4° C./min. The determination of Tm is achieved through fluorescent detection and Tagg is achieved through static light scatter detection. The resulting chromatograph of unfolding fluorescence shift and static light scatter versus the change in temperature is defined by algorithmic analysis and yield the Tm inflection point and the onset of aggregation is the Tagg.

[0468] The results of the Tm analysis for the first round huSP34 Fab variants are shown in Table 23. All first round Fabs showed improved thermodynamic stability compared to the mSP34 Fab (60.1° C.) and comparator #6 (58.8° C.), suggesting that the structure-guided humanization approach led to significant improvements in thermodynamic stability for the huSP34 variants tested herein.

TABLE 23
Melting Temperature (Tm) in ° C. Determined for the First Round huSP34 Fabs

| | HC1 | HC2 | HC3 | HC4 | HC5 | HC6 | HC7 | HC8 | HC9 | HC10 |
|---|---|---|---|---|---|---|---|---|---|---|
| LC1 | 67.5 | 67.6 | 68.1 | 68.4 | 67.6 | 67.0 | 67.0 | 66.1 | 65.7 | n.d.* |
| LC2 | 67.4 | 67.2 | 67.7 | 67.6 | 67.0 | 67.6 | 66.9 | 66.4 | 65.6 | 65.1 |
| LC3 | 68.1 | 67.8 | 67.9 | 67.9 | 67.0 | 67.8 | 73.4 | 66.0 | 65.3 | 65.5 |
| LC4 | 67.0 | 67.5 | 67.6 | 67.5 | 67.1 | 67.1 | 65.0 | 65.5 | 64.6 | 65.2 |
| LC5 | 66.8 | 66.4 | 67.5 | 66.3 | 65.5 | 66.5 | 64.8 | 64.9 | 64.3 | 64.8 |
| LC6 | 62.2 | 67.2 | 64.0 | 65.1 | 65.5 | 65.6 | 64.4 | 64.2 | 63.3 | 63.8 |

*n.d. = not determined

[0469] The results of the Tagg analysis for the first round huSP34 Fab variants are shown in Table 24. Many of the first round huSP34 Fabs showed reduce aggregation propensity compared to the mSP34 Fab (57.7° C.) and comparator #6 (54.3° C.), suggesting that the structure-guided humanization approach led to improvements in thermodynamic stability for the huSP34 variants tested herein. Surprisingly, HC3, which showed relatively high levels of aggregate content in the SEC analysis (Table 17), showed the lowest aggregation propensity in the Tagg analysis presented in Table 24.

TABLE 24
Aggregation Temperature (Tagg) in ° C.
Determined for the First Round huSP34 Fabs

| | HC1 | HC2 | HC3 | HC4 | HC5 | HC6 | HC7 | HC8 | HC9 | HC10 |
|---|---|---|---|---|---|---|---|---|---|---|
| LC1 | 61.8 | 61.9 | 63.5 | 62.0 | 61.4 | 61.4 | 61.9 | 60.7 | 59.4 | 43.2 |
| LC2 | 61.8 | 61.6 | 62.4 | 62.4 | 62.5 | 62.0 | 62.6 | 61.4 | 60.5 | 60.1 |
| LC3 | 62.3 | 62.0 | 61.9 | 61.9 | 60.7 | 61.8 | 62.0 | 61.2 | 60.0 | 58.9 |
| LC4 | 61.6 | 61.5 | 61.7 | 60.9 | 61.0 | 61.6 | 62.6 | 59.8 | 60.0 | 59.3 |
| LC5 | 61.3 | 60.9 | 62.0 | 60.4 | 59.8 | 60.8 | 61.0 | 59.9 | 59.5 | 59.8 |
| LC6 | 57.4 | 61.6 | 58.4 | 59.6 | 59.0 | 61.4 | 61.0 | 58.3 | 58.2 | 49.4 |

### Example 5

### CD3 Affinity Screening Using Biolayer Interferometry (BLI)

[0470] The CD3 binding kinetics of the purified huSP34 Fabs were determined using OctetRed384 (Pall ForteBio, CA) biolayer interferometry (BLI). Samples or buffer were dispensed into polypropylene 384-well black flat bottom plates (Greiner, Germany 781209) at a volume of 100 μl per well and all measurements were performed at 30° C. with agitation at 1000 rpm. Streptavidin (SA) coated biosensors tips (Pall ForteBio, CA) were used to capture biotinylated CD3 epsilon: delta heterodimer and typical immobilization levels captured on the SA sensors were 1 nm which approximately translates to 300 ng/ml of captured protein. For kinetic measurements biosensors were first pre-wetted with assay buffer for 10 minutes to remove protective sucrose coating followed by the recommended regeneration conditions for standardization of the biosensor surface for the experiment. In order to load the biosensors with antigen, 300 ng/ml of biotinylated CD3 epsilon: delta heterodimer protein (Amsbio AMS.CDD-H52WO) was immobilized on the SA sensor for 900 seconds. The CD3 loaded biosensors were then blocked with 20 ug/ml biocytin (sigma) for 200 seconds and then dipped into assay buffer containing wells for 200 seconds to remove any non-specific protein or unbound CD3 heterodimer.

[0471] CD3 loaded and biocytin blocked biosensors were then transferred into fresh assay buffer for 200 seconds to collect a baseline read. Kinetic measurements for anti-CD3 Fab and bispecific antibody binding were performed by dipping the CD3-coated biosensors into wells containing multiple concentrations of Fab or Ab (0-300 nM) for 100 seconds followed by a 300 second dissociation time by transferring the biosensors into assay buffer containing wells. The CD3 loaded sensors were then regenerated for the next kinetic measurement. Biosensors were generated by removing bound Fabs or Ab from immobilized CD3 on SA biosensors. Regeneration conditions used consisted of 3 cycles of 5 seconds of dipping the biosensors in Regeneration Buffer (10 mM Glycine HCl pH 1.5) followed by Assay Buffer (10 mM sodium phosphate pH 7.4, 140 mM Sodium Chloride, 0.005% Tween20 with 0.2% BSA).

[0472] All sensorgrams were referenced for buffer effects and fitted to an one-site binding model using Octet Data Analysis Software V.11 (Pall ForteBio, CA) generating affinity values for association (kₒₙ), dissociation (k_{off}) rate constants and the equilibrium dissociation constant (K_{D}).

[0473] The results for the first round huSP34 Fabs and relevant comparators are shown in Table 25. All first round huSP34 Fabs shows reduced affinity relative to the mSP34 Fab and comparator #6. However, comparing this dataset with the sequences shown in FIG. 3 revealed numerous SAR relationships, including residues predicted to improve the affinity of huSP34 as well as human residues that could be incorporated in or directly adjacent to the mSP34 CDRs without negatively impacting functional properties. Heavy chain residues T31, I51, D73, and Y102 were all associated with variants that had higher affinity. Heavy chain residues S30 (CDR1) and G49 (adjacent to CDR2) appeared to have no impact on affinity when incorporated in huSP34 variants, but both increased the match of huSP34 variants to the human germline. Residue S30 was also associated with improvements to the analytical CX-1 percent main peak values. Surprisingly, heavy chain residues H100, which was strongly associated with improved charge heterogeneity (FIG. 9), did not have a negative impact on CD3 affinity despite being in the center of CDR H3 (FIG. 1). Light chain residues had the most pronounced impact on affinity, with N52, K53, G57, V58 and N94 being associated with huSP34 variants that had improved affinity.

TABLE 25
Humanization of mSP34-Round 1: Affinity
Determined by BLI (Octet)

| Ab Name | K_{D} (nM) | kₒₙ (M⁻¹ s⁻¹) | k_{off} (s⁻¹) |
|---|---|---|---|
| Comparator #6 Fab-HF | 7.1 | 3.49E+05 | 2.44E−03 |
| mSP34 Fab-HF | 9.6 | 2.62E+05 | 2.50E−03 |
| huSP34.1.1 Fab-HF | 13.1 | 2.29E+05 | 3.01E−03 |
| huSP34.1.2 Fab-HF | 24.9 | 3.11E+05 | 7.62E−03 |
| huSP34.1.3 Fab-HF | 12.9 | 3.08E+05 | 3.98E−03 |
| huSP34.1.4 Fab-HF | 59.7 | 4.82E+05 | 2.86E−02 |
| huSP34.1.5 Fab-HF | 80.7 | 2.47E+05 | 1.98E−02 |
| huSP34.1.6 Fab-HF | 15.5 | 2.30E+05 | 3.53E−03 |
| huSP34.2.1 Fab-HF | 24.6 | 2.46E+05 | 5.96E−03 |
| huSP34.2.2 Fab-HF | 26.4 | 6.09E+05 | 1.41E−02 |
| huSP34.2.3 Fab-HF | 16.9 | 4.34E+05 | 7.30E−03 |
| huSP34.2.4 Fab-HF | 99.4 | 3.98E+05 | 3.35E−02 |
| huSP34.2.5 Fab-HF | 162 | 2.51E+05 | 4.08E−02 |
| huSP34.2.6 Fab-HF | 30.6 | 3.51E+05 | 1.07E−02 |
| huSP34.3.1 Fab-HF | 14.7 | 2.52E+05 | 3.66E−03 |
| huSP34.3.2 Fab-HF | 25.4 | 3.81E+05 | 9.52E−03 |
| huSP34.3.3 Fab-HF | 16.4 | 2.66E+05 | 4.37E−03 |
| huSP34.3.4 Fab-HF | 85.8 | 2.87E+05 | 2.46E−02 |
| huSP34.3.5 Fab-HF | 68.5 | 2.60E+05 | 1.77E−02 |
| huSP34.3.6 Fab-HF | 18.9 | 2.66E+05 | 4.82E−03 |
| huSP34.4.1 Fab-HF | 19.8 | 3.96E+05 | 7.23E−03 |
| huSP34.4.2 Fab-HF | 45.2 | 3.21E+05 | 1.44E−02 |
| huSP34.4.3 Fab-HF | 29.6 | 2.96E+05 | 8.68E−03 |
| huSP34.4.4 Fab-HF | 159 | 2.74E+05 | 4.36E−02 |
| huSP34.4.5 Fab-HF | 211 | 2.41E+05 | 5.06E−02 |
| huSP34.4.6 Fab-HF | 22.7 | 4.51E+05 | 1.01E−02 |
| huSP34.5.1 Fab-HF | 123 | 3.11E+05 | 3.65E−02 |
| huSP34.5.2 Fab-HF | 1200 | 9.08E+04 | 1.09E−01 |
| huSP34.5.3 Fab-HF | 539 | 1.35E+05 | 7.29E−02 |
| huSP34.5.4 Fab-HF | 497 | 4.29E+05 | 2.13E−01 |
| huSP34.5.5 Fab-HF | 666 | 2.77E+05 | 1.85E−01 |
| huSP34.5.6 Fab-HF | 268 | 2.80E+05 | 7.46E−02 |
| huSP34.6.1 Fab-HF | 53.9 | 4.78E+05 | 1.99E−02 |
| huSP34.6.2 Fab-HF | 351 | 1.44E+05 | 4.99E−02 |
| huSP34.6.3 Fab-HF | 150 | 1.89E+05 | 2.72E−02 |
| huSP34.6.4 Fab-HF | 570 | 3.59E+05 | 2.02E−01 |
| huSP34.6.5 Fab-HF | 353 | 2.73E+05 | 9.63E−02 |
| huSP34.6.6 Fab-HF | 75.0 | 4.64E+05 | 2.92E−02 |
| huSP34.7.1 Fab-HF | 372 | 2.35E+05 | 8.55E−02 |
| huSP34.7.2 Fab-HF | 498 | 3.18E+05 | 1.55E−01 |
| huSP34.7.3 Fab-HF | 365 | 2.40E+05 | 7.43E−02 |
| huSP34.7.4 Fab-HF | 4180 | 2.65E+05 | 4.24E−01 |
| huSP34.7.5 Fab-HF | 1460 | 3.07E+05 | 8.48E−01 |
| huSP34.7.6 Fab-HF | 425 | 4.03E+05 | 1.70E−01 |
| huSP34.8.1 Fab-HF | 443 | 1.86E+05 | 8.23E−02 |
| huSP34.8.2 Fab-HF | 3440 | 1.72E+05 | 9.82E−02 |
| huSP34.8.3 Fab-HF | 285 | 2.80E+05 | 7.99E−02 |
| huSP34.8.4 Fab-HF | 305 | 5.61E+05 | 1.63E−01 |
| huSP34.8.5 Fab-HF | 234 | 9.58E+05 | 2.19E−01 |
| huSP34.8.6 Fab-HF | 375 | 3.67E+05 | 1.38E−01 |
| huSP34.9.1 Fab-HF | 417 | 1.87E+05 | 7.79E−02 |
| huSP34.9.2 Fab-HF | 761 | 1.92E+05 | 1.45E−01 |
| huSP34.9.3 Fab-HF | 349 | 1.87E+05 | 6.51E−02 |
| huSP34.9.4 Fab-HF | 6120 | 4.09E+04 | 2.50E−01 |
| huSP34.9.5 Fab-HF | NBD** | NBD | NBD |
| huSP34.9.6 Fab-HF | 289 | 5.82E+05 | 1.69E−01 |
| huSP34.10.1 Fab-HF | NBD | NBD | NBD |
| huSP34.10.2 Fab-HF | 307 | 2.25E+05 | 6.64E−02 |
| huSP34.10.3 Fab-HF | 264 | 2.40E+05 | 6.33E−02 |
| huSP34.10.4 Fab-HF | NBD | NBD | NBD |
| huSP34.10.5 Fab-HF | 222 | 2.22E−07 | 8.27E−02 |
| huSP34.10.6 Fab-HF | 314 | 3.14E−07 | 1.57E−01 |

*Results represent the average of two independent runs
**NBD = no binding detected.

[0474] The results for the second round huSP34 Fabs and relevant comparators are shown in Table 26. Many of the second round huSP34 Fabs show improved affinity relative to the first round huSP34 Fabs and comparator molecules. Heavy chain 13 (HC13) and light chain 10 (LC10) were associated with the highest affinity second round huSP34 variants.

TABLE 26
Humanization of mSP34-Round 2: Affinity
Determined by BLI (Octet)

| Name | K_{D} (nM) | kₒₙ (M⁻¹ s⁻¹) | k_{off} (s⁻¹) |
|---|---|---|---|
| huSP34.3.7 Fab-HF | 5.6 | 3.23E+05 | 1.68E−03 |
| huSP34.3.8 Fab-HF | 4.4 | 2.55E+05 | 1.13E−03 |
| huSP34.3.9 Fab-HF | 3.5 | 6.32E+05 | 2.21E−03 |
| huSP34.3.10 Fab-HF | 2.0 | 6.83E+05 | 1.37E−03 |
| huSP34.11.7 Fab-HF | 3.6 | 6.13E+05 | 2.12E−03 |
| huSP34.11.8 Fab-HF | 2.8 | 6.10E+05 | 1.65E−03 |
| huSP34.11.9 Fab-HF | 3.4 | 8.98E+05 | 2.84E−03 |
| huSP34.11.10 Fab-HF | 2.8 | 6.97E+05 | 1.92E−03 |
| huSP34.12.7 Fab-HF | 2.7 | 9.66E+05 | 2.44E−03 |
| huSP34.12.8 Fab-HF | 3.4 | 4.93E+05 | 1.66E−03 |
| huSP34.12.9 Fab-HF | 3.2 | 1.04E+06 | 3.35E−03 |
| huSP34.12.10 Fab-HF | 4.2 | 5.01E+05 | 2.05E−03 |
| huSP34.13.7 Fab-HF | 2.8 | 1.01E+06 | 2.75E−03 |
| huSP34.13.8 Fab-HF | 2.5 | 9.33E+05 | 2.16E−03 |
| huSP34.13.9 Fab-HF | 2.7 | 1.38E+06 | 3.61E−03 |
| huSP34.13.10 Fab-HF | 1.7 | 1.36E+06 | 2.04E−03 |
| huSP34.1.3 Fab-HF | 4.3 | 1.36E+06 | 4.97E−03 |
| mSP34 Fab-HF v2 | 5.2 | 5.32E+05 | 2.66E−03 |
| Comparator #5 Fab-HF | 4.7 | 4.91E+05 | 2.31E−03 |
| huSP34.8.5 Fab-HF | NBD** | NBD | NBD |

*Results represent the average of two independent runs
**NBD = no binding detected.

[0475] The results for the third round huSP34 Fabs and relevant comparators are shown in Table 27. A range of affinity variants were explored.

TABLE 27
Humanization of mSP34-Round 3: CD3
Affinity Determined by BLI (Octet)

| Ab Name | K_{D}(nM) | kₒₙ (M⁻¹ s⁻¹) | k_{off} (s⁻¹) |
|---|---|---|---|
| huSP34.1.3 Fab-HF | 3.8 | 6.03E+05 | 2.30E−03 |
| huSP34.3.8 Fab-HF | 1.9 | 1.31E+05 | 2.40E−04 |
| huSP34.3.10 Fab-HF | 2.3 | 1.42E+05 | 2.35E−04 |
| huSP34.34.10 Fab-HF | 4.0 | 1.55E+05 | 3.03E−04 |
| huSP34.34.14 Fab-HF | 3.9 | 3.45E+05 | 1.26E−03 |
| huSP34.34.15 Fab-HF | 14.7 | 1.09E+05 | 1.50E−03 |
| huSP34.34.12 Fab-HF | 8.1 | 1.89E+05 | 1.40E−03 |
| huSP34.34.6 Fab-HF | 8.0 | 4.49E+05 | 3.57E−03 |
| huSP34.35.10 Fab-HF | 224 | 3.39E+05 | 7.59E−02 |
| huSP34.34.16 Fab-HF | 28.8 | 2.08E+05 | 5.99E−03 |
| huSP34.35.14 Fab-HF | 162 | 3.97E+07 | 1.16E−01 |
| huSP34.34.17 Fab-HF | 29.9 | 2.73E+05 | 8.16E−03 |
| huSP34.35.15 Fab-HF | 303 | 5.60E+05 | 1.70E−01 |
| huSP34.34.18 Fab-H | 87.1 | 2.57E+05 | 2.24E−02 |
| huSP34.35.12 Fab-H | 125 | 2.08E+06 | 1.03E−01 |
| huSP34.35.6 Fab-HF | 178 | 1.55E+06 | 1.87E−01 |
| huSP34.36.10 Fab-HF | 5.8 | 1.60E+06 | 9.29E−03 |
| huSP34.37.10 Fab-HF | 16.1 | 1.71E+05 | 2.67E−03 |
| huSP34.3.13 Fab-HF | 6.2 | 2.18E+05 | 1.29E−03 |
| huSP34.3.19 Fab-HF | 9.9 | 1.93E+05 | 1.64E−03 |
| huSP34.34.3 Fab-HF | 18.3 | 2.44E+05 | 4.10E−03 |
| huSP34.34.11 Fab-HF | 10.8 | 1.43E+05 | 1.18E−03 |

*Results represent the average of two independent runs

[0476] Selected huSP34 Fabs were next reformatted into bispecific antibodies (Example 2) and their CD3 affinities assessed by Octet are shown in Table 28.

TABLE 28
Anti-CD3 Affinity of Selected Bispecific Antibodies*

| Ab | Features | K_{D}(nM) | kₒₙ(M⁻¹ s⁻¹) | k_{off}(s⁻¹) |
|---|---|---|---|---|
| 257 | hPGT121.66 AAS + W/huSP34.34.3 scFv AAS + SAV + R | 10.3 | 6.20E+05 | 6.19E−03 |
| 274 | hPGT121.66 AAS + W/huSP34.34.11 scFv AAS + SAV + R | 16.0 | 1.16E+05 | 1.72E−03 |
| 273 | hPGT121.66 AAS + W/huSP34.34.10 scFv AAS + SAV + R | 8.4 | 1.20E+05 | 8.30E−04 |
| 275 | hPGT121.66 AAS + W/huSP34.34.12 scFv AAS + SAV + R | 9.9 | 4.33E+05 | 4.31E−03 |
| 256 | hPGT121.66 AAS + W/huSP34.3.8 scFv AAS + SAV + R | 7.1 | 6.66E+04 | 4.75E−04 |
| 243 | hPGT121.66 AAS + W/huSP34.3.13 scFv AAS + SAV + R | 16.8 | 1.06E+05 | 1.71E−03 |
| 261 | hPGT121.66 AAS + W/huSP34.13.8 scFv AAS + SAV + R | 20.8 | 4.85E+04 | 9.47E−04 |

*Results represent the average of two independent runs

[0477] In order to facilitate purification of bispecific antibodies, A series of huSP34 variants were designed that incorporated mutations designed to reduce or ablate Protein A binding to the huSP34 VH3 domain. The Protein A knockouts were generated in the background of the huSP34.13.8 variant. The CD3 affinities (Octet) of bispecific antibodies incorporating these huSP34 Protein A knockout variants as well as the huSP34.13.8 variant are shown in Table 29. The results suggest that the Protein A knockout mutations had minimal impact on CD3 binding affinity.

TABLE 29
Protein A Knockouts in Bispecific Format Octet Data*

| Ab | Features | K_{D}(nM) | kₒₙ(M⁻¹ s¹) | k_{off}(s⁻¹) |
|---|---|---|---|---|
| 266 | hPGT121.66 AAS + W/huSP34.14.8scFv AAS + SAV + R | 24.3 | 3.90E+04 | 9.32E−04 |
| 267 | hPGT121.66 AAS + W/huSP34.19.8scFv AAS + SAV + R | 14.7 | 7.22E+04 | 1.04E−03 |
| 268 | hPGT121.66 AAS + W/huSP34.25.8scFv AAS + SAV + R | 10.6 | 8.76E+04 | 9.28E−04 |
| 269 | hPGT121.66 AAS + W/huSP34.26.8scFv AAS + SAV + R | 9.3 | 5.59E+04 | 5.04E−04 |
| 270 | hPGT121.66 AAS + W/huSP34.27.8 scFv AAS + SAV + R | 13.2 | 7.63E+04 | 1.00E−03 |
| 271 | hPGT121.66 AAS + W/huSP34.28.8 scFv AAS + SAV + R | 15.8 | 8.46E+04 | 1.34E−03 |
| 272 | hPGT121.66 AAS + W/huSP34.33.8 scFv AAS + SAV + R | 15.3 | 7.74E+04 | 1.18E−03 |

*Results represent the average of two independent runs

### Example 6

### CD3 Affinity Screening Using Surface Plasmon Resonance

[0478] To determine the CD3 binding kinetics of selected Fabs or bispecific antibodies, we next conducted surface plasmon resonance biosensor studies. Experiments were performed on a Biacore 4000 instrument. Streptavidin was chemically immobilized on a C1 chip. Biotinylated CD3 (Acro Biosystems, biotinylated Human CD3E and CD3D Cat CDD-H82W1, lot BVG51-93TF1-NY) was captured at various densities. Various bispecific fusions proteins containing huSP34 anti-CD3 scFv or Fab domains were then injected at various concentrations over the CD3 surfaces. Kinetic data was then fit to a simple kinetic model yielding rate constants kₒₙ and k_{off} for the association and dissociation phases, and the equilibrium dissociation constant, K_{D}. FIG. 10 shows an example of data obtained from this study. Shown is the response obtained from the interaction of hPGT121.66 AAS W/huSP34.39.13 scFv AAS+SAV+R, injected at various concentrations all for a contact time of 120 seconds over CD3 surfaces, and then monitored for various dissociation times. Data was fit to a simple kinetic model. In this example, black lines denote data, and grey lines, the fit to the data. Values for kₒₙ, k_{off} and KD have been tabulated in Table 30.

TABLE 30
CD3 Binding Kinetic Parameters of Selected Bispecific Antibodies

| Ab | Features | K_{D}(nM) | kₒₙ(M⁻¹ s⁻¹) | k_{off}(s⁻¹) |
|---|---|---|---|---|
| 243 | hPGT121.66 AAS + W/huSP34.3.13 scFv AAS + SAV + R | 2.4 | 3.60E+06 | 8.40E−03 |
| 257 | hPGT121.66 AAS + W/huSP34.34.3 scFv AAS + SAV + R | 43 | 3.90E+05 | 1.70E−02 |
| 274 | hPGT121.66 AAS + W/huSP34.34.11 scFv AAS + SAV + R | 3.9 | 3.30E+06 | 1.29E−02 |
| 273 | hPGT121.66 AAS + W/huSP34.34.10 scFv AAS + SAV + R | 3.9 | 2.60E+06 | 1.02E−02 |
| 275 | hPGT121.66 AAS + W/huSP34.34.12 scFv AAS + SAV + R | 32 | 3.70E+05 | 1.19E−02 |
| 256 | hPGT121.66 AAS + W/huSP34.3.8 scFv AAS + SAV + R | 2.5 | 2.80E+06 | 7.10E−03 |
| 249 | hPGT121.66 AAS W/huSP34.39.13 scFv AAS + SAV + R | 2.6 | 3.40E+06 | 9.00E−03 |
| 276 | hPGT121.66 AAS + W/huSP34.40.13 scFv AAS + SAV + R | 1.8 | 3.60E+06 | 6.30E−03 |
| 277 | hPGT121.66 AAS + W/huSP34.41.13 scFv AAS + SAV + R | 2.8 | 3.00E+06 | 8.50E−03 |
| 218 | h3BNC117.52.64 AAS + SAV + YTE/huSP34.3.13 scFv AAS + W + YTE | 2.7 | 3.30E+06 | 8.70E−03 |
| 180 | hCD4D1.22 Fc AAS + W + YTE/huSP34.39.13 AAS + SAV + R | 2.5 | 2.00E+06 | 4.90E−03 |
| 188 | hCD4D1.22 Fc AAS + W + YTE/huSP34.40.13 AAS + SAV + R | 1.6 | 2.20E+06 | 3.60E−03 |
| 189 | hCD4D1.22 Fc AAS + W + YTE/huSP34.41.13 AAS + SAV + R | 2.0 | 2.40E+06 | 4.70E−03 |

### Example 7

### Polyspecificity Assessment of huSP34 Variant Antibodies

[0479] Polyspecificity of therapeutic antibodies may adversely affect PK properties and present potential safety concerns. In this example, we evaluated the polyspecificity risk of antibodies in an anti-baculoviral particle (BVP) ELISA assay (Hötzel, et al., mAbs (2012) 4:753-760). Test articles were assayed at 75 μg/mL concentration in duplicate in each experiment, and the BVP score was calculated as a ratio of OD450 to no mAb background. The risk for polyspecificity of bivalent IgG was then determined by comparison of the BVP score to thresholds set by four benchmark antibodies for no, low, medium and high risk of polyspecificity (Jam, et al., Proc. Na. Acad. Sci. USA (2017) 114:944-949).

[0480] To compare the polyspecificity of 3huSP34 variants with different anti-CD3 affinities, a panel of 28 IgG1s was tested in the BVP assay. The results of the BVP assays, including calculated BVP score and polyspecificity risk categorized based on thresholds determined by benchmark controls, are shown in Table 31. Significant differences in polyspecificity risk were observed among variants tested.

TABLE 31
Polyspecificity Assessment of SP34 IgG1 Variants in BVP assay.

| Name | BVP Score (mean) | BVP Score (stdv) | N |
|---|---|---|---|
| huSP34.2.1/hG1/hLam | 2.9 | 0.4 | 3 |
| huSP34.3.8/hG1/hLam | 3.1 | 0.6 | 3 |
| huSP34.1.1/hG1/hLam | 3.3 | 0.7 | 3 |
| huSP34.1.6/hG1/hLam | 4.5 | 0.7 | 3 |
| huSP34.11.7/hG1/hLam | 4.7 | 1.0 | 3 |
| huSP34.1.3/hG1/hLam | 5.3 | 1.8 | 8 |
| huSP34.12.10/hG1/hLam | 5.8 | 1.2 | 3 |
| huSP34.3.9/hG1/hLam | 7.5 | 0.8 | 3 |
| huSP34.13.10/hG1/hLam | 7.5 | 2.1 | 8 |
| huSP34.2.3/hG1/hLam | 7.5 | 11.5 | 3 |
| huSP34.2.6/hG1/hLam | 7.2 | 0.7 | 3 |
| huSP34.11.10/hG1/hLam | 7.2 | 2.0 | 3 |
| huSP34.3.1/hG1/hLam | 8.1 | 2.1 | 3 |
| huSP34.4.1/hG1/hLam | 8.5 | 1.3 | 3 |
| huSP34.3.10/hG1/hLam | 9.0 | 1.0 | 3 |
| huSP34.12.8/hG1/hLam | 9.2 | 0.8 | 3 |
| huSP34.3.6/hG1/hLam | 9.2 | 3.5 | 8 |
| huSP34.3.3/hG1/hLam | 10.2 | 2.0 | 3 |
| huSP34.4.3/hG1/hLam | 11.4 | 3.1 | 3 |
| huSP34.3.7/hG1/hLam | 12.1 | 3.0 | 3 |
| huSP34.12.9/hG1/hLam | 13.2 | 1.6 | 3 |
| huSP34.4.6/hG1/hLam | 13.8 | 3.0 | 3 |
| huSP34.11.8/hG1/hLam | 13.4 | 2.9 | 3 |
| huSP34.13.8/hG1/hLam | 14.3 | 4.0 | 8 |
| huSP34.12.7/hG1/hLam | 15.5 | 3.8 | 3 |
| huSP34.13.9/hG1/hLam | 18.0 | 5.6 | 3 |
| huSP34.11.9/hG1/hLam | 18.1 | 4.8 | 3 |
| huSP34.13.7/hG1/hLam | 18.2 | 4.5 | 3 |

[0481] In order to further evaluate polyspecificity risk of selected anti-CD3 SP34 variants in various bispecific antibody formats, selected huSP34 heavy chain and light chain variant pairs were selected to produce anti-HIV gp120 bispecific antibodies and tested alongside a number of related human IgG1 and effector enhanced human IgG1 antibodies. The results of this BVP analysis are shown in Table 32. The results suggest that the PGT121.66 anti-gp20 binding arm used for these studies has a low BVP score when formatted as an effector functional enhanced human IgG1. The results also suggest that huSP34 variants with low BVP scores as an IgG1, also have low BVP scores when formatted as bispecific antibodies. Finally, the results suggest that the H435R+Y436F Fc mutation introduced to eliminate Protein A binding in the “hole” Fc domain has no impact on poly specificity.

TABLE 32
Polyspecificity Assessment of huSP34 and PGT121 Variants Formatted
as IgG1, Effector Enhanced IgG1 or Bispecific Antibodies

| Ab | Features | Avg. BVP | stdev | N |
|---|---|---|---|---|
| | huSP34.13.8/hG1/hLam | 14.2 | 4.1 | 8 |
| | huSP34.13.10/hG1/hLam | 7.1 | 2.0 | 8 |
| | huSP34.1.3/hG1/hLam | 5.3 | 1.6 | 8 |
| | huSP34.3.6/hG1/hLam | 9.2 | 2.9 | 8 |
| 250 | hPGT121.66 AAS + SAV/huSP34.1.3 scFv AAS + W | 5.5 | 1.1 | 5 |
| 251 | hPGT121.66 AAS + W/huSP34.1.3 scFv AAS + SAV + RF | 5.4 | 2.1 | 5 |
| 265 | hPGT121.66 AAS + W/huSP34.13.10 scFv AAS + SAV + RF | 12.6 | 4.4 | 5 |
| 258 | hPGT121.66 AAS + W/huSP34.3.4 scFv AAS + SAV + RF | 9.3 | 3.3 | 5 |
| 260 | hPGT121.66 AAS + W/huSP34.8.3 scFv AAS + SAV + RF | 4.8 | 1.6 | 5 |
| | PGT121.66 hIgG1/hLambda | 4.0 | 1.2 | 5 |

[0482] In order to assess the role of both anti-CD3 affinity and anti-CD3 Protein A knockout mutations (see, Example 3) made in the variable domain of huSP34, we produced a panel of HIV anti-gp120 bispecific antibodies with different anti-CD3 huSP34 variant arms, but containing the same PGT121.66 targeting arm and identical knob-in-hole bispecific Fc domains incorporating the H435R Fc Protein A knockout mutation. The results of the BVP analysis conducted on these antibodies is shown in Table 33. The results suggest that the Protein A knockout variants show only small increases in polyspecificity compared to huSP34.13.8 and further identify the huSP34.3.13 variant as the molecule with the lowest poly specificity.

TABLE 33
Polyspecificity assessment of huSP34 scFv Affinity Variants and huSP34 scFv
Protein A Knockout Variants Formatted as Anti-HIV gp120 Bispecific Antibodies

| Ab | Features | Avg. BVP | stdev | N |
|---|---|---|---|---|
| 261 | hPGT121.66 AAS + W/huSP34.13.8scFv AAS + SAV + R | 15.1 | 1.7 | 3 |
| 266 | hPGT121.66 AAS + W/huSP34.14.8scFv AAS + SAV + R | 15.7 | 3.7 | 3 |
| 267 | hPGT121.66 AAS + W/huSP34.19.8scFv AAS + SAV + R | 18.2 | 2.2 | 3 |
| 268 | hPGT121.66 AAS + W/huSP34.25.8scFv AAS + SAV + R | 20.0 | 2.1 | 3 |
| 269 | hPGT121.66 AAS + W/huSP34.26.8scFv AAS + SAV + R | 20.8 | 2.1 | 3 |
| 270 | hPGT121.66 AAS + W/huSP34.27.8scFv AAS + SAV + R | 22.0 | 1.2 | 3 |
| 271 | hPGT121.66 AAS + W/huSP34.28.8scFv AAS + SAV + R | 21.7 | 1.4 | 3 |
| 272 | hPGT121.66 AAS + W/huSP34.33.8scFv AAS + SAV + R | 21.2 | 2.0 | 3 |
| 257 | hPGT121.66 AAS + W/huSP34.34.3scFv AAS + SAV + R | 11.6 | 3.1 | 3 |
| 274 | hPGT121.66 AAS + W/huSP34.34.11scFv AAS + SAV + R | 14.8 | 3.6 | 3 |
| 273 | hPGT121.66 AAS + W/huSP34.34.10scFv AAS + SAV + R | 18.5 | 4.2 | 7 |
| 275 | hPGT121.66 AAS + W/huSP34.34.12scFv AAS + SAV + R | 15.3 | 3.6 | 3 |
| 256 | hPGT121.66 AAS + W/huSP34.3.8scFv AAS + SAV + R | 13.9 | 2.8 | 5 |
| 243 | hPGT121.66 AAS + W/huSP34.3.13scFv AAS + SAV + R | 8.6 | 2.5 | 7 |

[0483] We next conducted BVP assays on a panel of anti-HIV-gp120 bispecific antibodies containing the three most effective Protein A knockout variants in the huSP34.3.13 scFv background alongside relevant controls. The results of this assessment are shown in Table 34 and demonstrate that huSP34 Protein A knockout variants huSP34.39.13 has a very similar polyspecificity risk as huSP34.3.13. In contrast, huSP34.40.13 and huSP34.41.13 exhibit high BVP scores more like huSP34.34.10.

TABLE 34
Polyspecificity Assessment of huSP34 scFv Protein A Knockout Variants
and Controls Formatted as Anti-HIV gp120 Bispecific Antibodies

| Ab | Features | Avg. BVP | stdev | N |
|---|---|---|---|---|
| 243 | hPGT121.66 AAS + W/huSP34.3.13scFv AAS + SAV + R | 8.6 | 2.5 | 7 |
| 273 | hPGT121.66 AAS + W/huSP34.34.10scFv AAS + SAV + R | 18.5 | 4.2 | 7 |
| 249 | hPGT121.66 AAS W/huSP34.39.13scFv AAS SAV R | 9.3 | 1.7 | 4 |
| 276 | hPGT121.66 AAS + W/huSP34.40.13scFv AAS + SAV + R | 14.2 | 3.0 | 4 |
| 277 | hPGT121.66 AAS + W/huSP34.41.13scFv AAS + SAV + R | 13.6 | 3.0 | 4 |

### Example 8

### T-Cell Binding Characterization of huSP34 Variant Fabs and Anti-HIV Gp120 Bispecific Antibodies by Flow Cytometry

[0484] Binding of humanized SP34 Fab variants to CD3 expressed on cell-surface of primary human T cells was evaluated in a flow cytometry-based competition assay. Different concentrations of huSP34 Fab variants as well as mSP34, were incubated with 1×10⁵ T-cells in RPMI containing 0.2 μL of murine SP34-Alexa Fluor 488 (BD Pharmingen Cat #557705), 0.5 μL anti-CD4-BV711 mAb (BD Biosciences Cat #563028) and 0.5 μL anti-CD8-APC/Cy7 mAb (BD Biosciences Cat #560179) for 1 hour at room temperature. Cells were then washed, fixed, and murine SP34-AF488 binding to cell-surface CD3 was measured on a flow cytometer (BD LSRFortessa). The concentration of each huSP34 Fab variant or control that resulted in 50% inhibition (IC50) of murine SP34-AF488 binding to cell-surface CD3 was calculated using GraphPad Prism.

Round 1 huSP34 Variants

[0485] As summarized in Table 35, all of the first round huSP34 Fab variants tested exhibited mean IC50 values that ranged from 1.3 μg/mL to greater than 20 μg/mL and were higher (i.e., less potent binding) than that of mSP34 (0.70 3 μg/mL).

TABLE 35
IC50 values of first round SP34 humanization Fab variants

| | FACs IC50 | FACs IC50 | Average |
|---|---|---|---|
| huSP34 Fab | (μg/ml) n = 1 | (μg/ml) n = 2 | (μg/ml) |
| huSP34.1.3 Fab-HF | 1.53 | 1.13 | 1.33 |
| huSP34.1.6 Fab-HF | 1.67 | 1.12 | 1.39 |
| huSP34.1.1 Fab-HF | 1.72 | 1.27 | 1.49 |
| huSP34.3.3 Fab-HF | 2.95 | 1.99 | 2.47 |
| huSP34.3.1 Fab-HF | 3.56 | 2.22 | 2.89 |
| huSP34.3.6 Fab-HF | 8.48 | 1.03 | 4.75 |
| huSP34.2.3 Fab-HF | 4.24 | 3.15 | 3.70 |
| huSP34.2.6 Fab-HF | 4.68 | 3.40 | 4.04 |
| huSP34.2.1 Fab-HF | 6.17 | 3.68 | 4.92 |
| huSP34.4.3 Fab-HF | 7.94 | 5.11 | 6.53 |
| huSP34.1.2 Fab-HF | 8.21 | 5.29 | 6.75 |
| huSP34.4.1 Fab-HF | 9.57 | 5.90 | 7.74 |
| huSP34.3.2 Fab-HF | 11.93 | 6.44 | 9.19 |
| huSP34.4.6 Fab-HF | 18.52 | 4.20 | 11.36 |
| huSP34.3.5 Fab-HF | 12.88 | 10.00 | 11.44 |
| huSP34.1.4 Fab-HF | 15.03 | 11.80 | 13.41 |
| huSP34.1.5 Fab-HF | 17.34 | 12.46 | 14.90 |
| huSP34.2.2 Fab-HF | >20 | 16.59 | 16.59 |
| huSP34.3.4 Fab-HF | >20 | 17.34 | 17.34 |
| huSP34.5.1 Fab-HF | >20 | >20 | >20 |
| huSP34.4.2 Fab-HF | >20 | >20 | >20 |
| huSP34.5.2 Fab-HF | >20 | >20 | >20 |
| huSP34.5.3 Fab-HF | >20 | >20 | >20 |
| huSP34.2.4 Fab-HF | >20 | >20 | >20 |
| huSP34.4.4 Fab-HF | >20 | >20 | >20 |
| huSP34.5.4 Fab-HF | >20 | >20 | >20 |
| huSP34.2.5 Fab-HF | >20 | >20 | >20 |
| huSP34.4.5 Fab-HF | >20 | >20 | >20 |
| huSP34.5.5 Fab-HF | >20 | >20 | >20 |
| huSP34.5.6 Fab-HF | >20 | >20 | >20 |
| huSP34.6.1 Fab-HF | >20 | | >20 |
| huSP34.6.2 Fab-HF | >20 | | >20 |
| huSP34.6.3 Fab-HF | >20 | | >20 |
| huSP34.6.4 Fab-HF | >20 | | >20 |
| huSP34.6.5 Fab-HF | >20 | | >20 |
| huSP34.6.6 Fab-HF | >20 | | >20 |
| huSP34.7.1 Fab-HF | >20 | | >20 |
| huSP34.7.3 Fab-HF | >20 | | >20 |
| huSP34.7.6 Fab-HF | >20 | | >20 |
| huSP34.8.1 Fab-HF | >20 | | >20 |
| huSP34.8.2 Fab-HF | >20 | | >20 |
| huSP34.8.3 Fab-HF | >20 | | >20 |
| huSP34.8.4 Fab-HF | >20 | | >20 |
| huSP34.8.5 Fab-HF | >20 | | >20 |
| huSP34.8.6 Fab-HF | >20 | | >20 |
| huSP34.9.1 Fab-HF | >20 | | >20 |
| huSP34.9.2 Fab-HF | >20 | | >20 |
| huSP34.9.3 Fab-HF | >20 | | >20 |
| huSP34.9.4 Fab-HF | >20 | | >20 |
| huSP34.9.5 Fab-HF | >20 | | >20 |
| huSP34.9.6 Fab-HF | >20 | | >20 |
| huSP34.10.1 Fab-HF | >20 | | >20 |
| huSP34.10.2 Fab-HF | >20 | | >20 |
| huSP34.10.3 Fab-HF | >20 | | >20 |
| huSP34.10.4 Fab-HF | >20 | | >20 |
| huSP34.10.5 Fab-HF | >20 | | >20 |
| huSP34.10.6 Fab-HF | >20 | | >20 |
| mSP34 Fab HF | | | 0.70 |

Round 2 huSP34 Variants

[0486] A second round of huSP34 Fab variants were characterized using the same flow cytometry-based competition assay as described above. As summarized in Table 36, all variants from this round exhibited geometric mean 1C50 values that ranged from 0.15-0.73 μg/mL, many of which were improved relative to mSP34 (C50 0.68 2 μg/mL).

TABLE 36
IC50 Values of Second Round SP34 Humanization Fab Variants

| | FACs IC50 | FACs IC50 | Average |
|---|---|---|---|
| huSP34 Fab | (μg/ml) n = 1 | (μg/ml) n = 2 | (μg/ml) |
| huSP34.3.10 Fab-HF | 0.20 | 0.09 | 0.15 |
| huSP34.3.8 Fab-HF | 0.20 | 0.10 | 0.15 |
| huSP34.11.8 Fab-HF | 0.30 | 0.13 | 0.22 |
| huSP34.3.7 Fab-HF | 0.30 | 0.15 | 0.23 |
| huSP34.13.8 Fab-HF | 0.36 | 0.14 | 0.25 |
| huSP34.11.10 Fab-HF | 0.35 | 0.15 | 0.25 |
| huSP34.13.10 Fab-HF | 0.35 | 0.16 | 0.25 |
| huSP34.3.9 Fab-HF | 0.39 | 0.17 | 0.28 |
| huSP34.13.7 Fab-HF | 0.43 | 0.18 | 0.31 |
| huSP34.11.7 Fab-HF | 0.45 | 0.18 | 0.32 |
| huSP34.13.9 Fab-HF | 0.48 | 0.25 | 0.36 |
| huSP34.11.9 Fab-HF | 0.57 | 0.22 | 0.40 |
| huSP34.12.8 Fab-HF | 0.57 | 0.29 | 0.43 |
| huSP34.12.10 Fab-HF | 0.69 | 0.33 | 0.51 |
| huSP34.12.7 Fab-HF | 0.77 | 0.39 | 0.58 |
| huSP34.12.9 Fab-HF | 0.97 | 0.49 | 0.73 |
| mSP34 Fab HF | | | 0.68 |

### Example 9

### Characterization of HIV×CD3 Bispecific Molecules in T Cell Binding Assay

[0487] We characterized the T cell binding activity of a panel of five HIV×CD3 bispecific molecules that harbor a common a-HIV envelope binding arm, PGT121.66 paired with huSP34 variants (in scFv format) selected to cover a range of CD3-binding affinities as previously determined by bio-layer interferometry (BLI) and flow cytometry-based competition assays. Briefly, peripheral blood mononuclear cells (PBMCs) were incubated with different concentrations of HIV×CD3 bispecific molecules for 1 hour at RT. Cells were then washed and stained with α-huIgG-APC (Jackson ImmunoResearch Cat #109-136-098), α-CD4-BV711 (BD Biosciences Cat #563028), and α-CD8-APC-Cy7 (BD Biosciences Cat #560179) for 20 minutes at RT. Cells were then washed, fixed/permeabilized, and analyzed using BD LSRFortessa according to the manufacturer's protocol. The percentage of α-huIgG-APC-positive CD4+ and CD8+ T cells and the mean fluorescence intensity of the α-huIgG-APC of CD4+ and CD8+ cells were collected, and data analyzed using GraphPad Prism.

[0488] Binding experiments were performed using PBMCs from two healthy human donors. Overall, the EC₅₀ ranking for this panel of HIV×CD3 bispecific molecules compared well with K_{D} ranking previously determined by BLI for huSP34 variants in Fab format, and this was observed in both CD4+ and CD8+ T cell populations. The data is depicted in FIGS. 11 and 12, and summarized in Table 37.

TABLE 37
EC₅₀ Values Derived from Concentration-Response Curves of PGT121.66 × huSP34 Bispecifics Binding
to PBMCs and Compared with KD Previously Determined by BLI for huSP34 Variants in Fab Format.

| | | | EC₅₀ (□g/mL) | | | |
|---|---|---|---|---|---|---|
| | | | Donor 3761 | | Donor 4574 | |
| Ab | | huSP34 Fab | CD4+ | CD8+ | CD4+ | CD8+ |
| # | Features | K_{D} (nM) | cells | cells | cells | cells |
| 265 | hPGT121.66 AAS + W/huSP34.13.10scFv AAS + SAV + RF | 1.8 | 0.045 | 0.095 | 0.037 | 0.062 |
| 251 | hPGT121.66 AAS + W/huSP34.1.3scFv AAS + SAV + RF | 13 | 0.32 | 0.36 | 0.33 | 0.35 |
| 259 | hPGT121.66 AAS + W/huSP34.3.6scFv AAS + SAV + RF | 19 | 0.65 | 0.48 | 1.4 | 1.1 |
| 258 | hPGT121.66 AAS + W/huSP34.3.4scFv AAS + SAV + RF | 86 | 5.1 | 1.3 | 5.7 | 4.8 |
| 260 | hPGT121.66 AAS + W/huSP34.8.3scFv AAS + SAV + RF | 284 | >100 | 31.190 | >100 | >100 |

[0489] To assess whether humanized SP34 variants cross react to non-human primate CD3 with similar affinity, we characterized the human and rhesus monkey T cell binding activity of a panel of eight HIV×CD3 bispecific molecules that harbor a common α-HIV envelope binding arm, PGT121.66, or CD4 D1.22 domain, paired with huSP34 variants (in scFv or Fab formats) covering a range of CD3-binding affinities as previously determined by BLI or flow cytometry-based competition assays. Briefly, PBMCs from healthy human donors and healthy rhesus or cynomolgus monkey donors were incubated with different concentrations of HIV×CD3 bispecific molecules for 1 hour at RT. Cells were then washed and stained with α-huIgG-APC (Jackson ImmunoResearch Cat #109-136-098), α-CD4-BV711 (BD Biosciences Cat #563028), and α-CD8-APC-Cy7 (BD Biosciences Cat #560179) for 20 minutes at RT. Cells were then washed, fixed/permeabilized, and analyzed on BD LSRFortessa. The percentage of α-huIgG-APC-positive CD4+ and CD8+ T cells and the mFI of the α-huIgG-APC of CD4+ and CD8+ cells were collected, and data analyzed using GraphPad Prism.

[0490] FIG. 13-18 depict representative binding concentration-response curves. For all eight bispecific molecules tested in this panel, the EC₅₀ values determined for human and rhesus monkey T cell binding were within 2-fold of each other, suggesting huSP34 variant arm bound to human and monkey T cell with similar affinity. The data are summarized in Tables 38-39). This was observed in both CD4+ and CD8+ T cell populations.

TABLE 38
EC₅₀ Values of Binding Concentration-Response
Curve of PGT121.66 × huSP34 and CD4 × huSP34
Bispecifics to Human and Monkey CD4+ PBMCs
EC₅₀ (μg/mL) of % α-hu+ CD4+ PBMCs

| | Bispecific Antibody Name | | | | | | | | |
|---|---|---|---|---|---|---|---|---|---|
| Donor | 257 | 274 | 273 | 275 | 256 | 243 | 251 | 261 | 180 |
| hu 151 | 1.41 | 0.08 | 0.06 | 0.51 | 0.03 | 0.07 | 0.41 | 0.06 | — |
| hu 340 | 1.64 | 0.09 | 0.06 | 0.57 | 0.05 | 0.10 | 0.42 | 0.07 | — |
| hu 711 | — | — | — | — | — | — | — | — | 0.54 |
| hu 921 | — | — | — | — | — | — | — | — | 0.09 |
| rh 3563 | 1.48 | 0.07 | 0.05 | 0.68 | 0.02 | 0.08 | 0.40 | 0.07 | — |
| rh 3483 | 0.93 | 0.06 | 0.03 | 0.46 | 0.02 | 0.06 | 0.33 | 0.07 | — |
| cy 2177 | — | — | — | — | — | — | — | — | 0.50 |

TABLE 39
EC₅₀ Values of Binding Concentration-Response
Curve of PGT121.66 × huSP34 and CD4 × huSP34
Bispecifics to Human and Monkey CD8+ PBMCs
EC₅₀ (μg/mL) of % α-hu+ CD8+ cells

| | Bispecific Antibody Name | | | | | | | | |
|---|---|---|---|---|---|---|---|---|---|
| Donor | 257 | 274 | 273 | 275 | 256 | 243 | 251 | 261 | 180 |
| hu 151 | 1.62 | 0.10 | 0.07 | 0.85 | 0.04 | 0.09 | 0.44 | 0.08 | — |
| hu 340 | 1.21 | 0.13 | 0.08 | 0.88 | 0.06 | 0.14 | 0.68 | 0.10 | — |
| hu 711 | — | — | — | — | — | — | — | — | 1.10 |
| hu 921 | — | — | — | — | — | — | — | — | 0.08 |
| rh 3563 | 3.52 | 0.22 | 0.16 | 1.24 | 0.08 | 0.21 | 1.02 | 0.20 | — |
| rh 3483 | 2.35 | 0.11 | 0.10 | 0.93 | 0.04 | 0.11 | 0.55 | 0.13 | — |
| cy 2177 | — | — | — | — | — | — | — | — | 1.09 |

### Example 10

### In Vitro Killing of HIV-Infected CEM-NKr-CCr5-LucR+ CD4+ T Cells

[0491] The influence of CD3 affinity on CD3-bispecifics killing activity was assessed using HIV×CD3 bispecific molecules created using PGT121.66 as the Env-targeting arm and huSP34 (in scFv format) with a range of CD3 affinities as previously determined by BLI. The equilibrium dissociation constant (KD) of the CD3 Fabs used for creating the HIV×CD3 molecules are presented in Table 40.

TABLE 40
PGT121.66 × CD3 Bispecific Panel and CD3 Binding
Affinity for Corresponding huSP34 Fab Variants

| Ab | Features | huSP34 Fab − K_{D} (nM) |
|---|---|---|
| 265 | hPGT121.66 AAS + W/huSP34.13.10scFv AAS + SAV + RF | 1.8 |
| 251 | hPGT121.66 AAS + W/huSP34.1.3scFv AAS + SAV + RF | 13 |
| 259 | hPGT121.66 AAS + W/huSP34.3.6scFv AAS + SAV + RF | 19 |
| 258 | hPGT121.66 AAS + W/huSP34.3.4scFv AAS + SAV + RF | 86 |
| 260 | hPGT121.66 AAS + W/huSP34.8.3scFv AAS + SAV + RF | 284 |

[0492] The HIV-infected cell killing activity was evaluated using the CEM-NKr-CCR5-LucR+ lymphoblastoid reporter cell line infected with 5 different HIV-1 primary isolates or molecular clones as target cells and PBMCs or isolated T cells from two healthy donors as effector cells. CEM-NKr-CCR5-LucR+ cells were infected for 3 days, washed and co-cultured with PGT121.66×CD3 bispecific molecules and PBMCs (25:1 effector: target cell ratio) or isolated T cells (20:1 effector: target cell ratio) for 2 days and expression of tat-driven luciferase was quantified using One-Glo luciferase reagent (Promega). The percent infected cell killing was calculated using the following equation:

100−((RLU of HIV-infected target cells in treated wells/RLU HIV-infected target cells in untreated wells)*100).

[0493] For concentration-response curves that had an apparent Eₘₐₓ<20%, the Eₘₐₓ values were reported as <20% and the EC₅₀ values reported as >100 μg/mL (maximum concentration tested).

[0494] The results are displayed in Tables 41-42. FIG. 19 depicts a representative killing concentration-response curve (BaL-infected CEM-NKr-CCR5-LucR+ cells, PBMC effector cells, Donor 4408). Higher CD3 affinity was significantly correlated with lower (i.e., more potent) killing EC₅₀ values using either whole PBMCs (FIG. 20; r²=0.8403, P=0.0285) or isolated T cells (FIG. 21; r²=0.9618, P=0.0032) as effector cells. Thus, increasing CD3 affinity resulted in increased HIV×CD3 bispecific molecule-mediated killing potency.

TABLE 41
Killing EC₅₀ Values (μg/mL) of HIV-Infected CEM-NKr-
CCR5-LucR Reporter Cells Using PBMC Effector Cells
EC₅₀s - PBMCs (μg/ml)

| | Donor | | | | | | | | | |
|---|---|---|---|---|---|---|---|---|---|---|
| | 4560 | 4408 | 4560 | 4408 | 4560 | 4408 | 4560 | 4408 | 4560 | 4408 |
| Ab \| Isolate | 7552 | | 8398 | | Bal | | 1489 | | 727 | |
| 265 | 0.269 | 0.002 | 0.063 | 0.009 | 0.080 | 0.008 | 0.085 | 0.019 | 0.197 | 0.039 |
| 251 | 0.098 | 0.027 | 0.248 | 0.028 | 0.072 | 0.026 | 0.176 | 0.015 | 0.207 | 0.072 |
| 259 | 0.611 | 0.074 | 0.500 | 0.105 | 0.317 | 0.064 | 0.563 | 0.106 | 1.268 | 0.355 |
| 258 | 0.371 | 0.529 | 1.796 | 0.325 | 1.598 | 0.164 | 1.469 | 0.778 | 6.220 | 0.465 |
| 260 | 0.373 | 0.113 | 14.950 | 9.168 | 0.003 | 1.308 | 17.060 | 2.216 | 0.005 | 1.874 |

TABLE 42
Killing EC₅₀ Values (μg/mL) of HIV-Infected CEM-NKr-
CCR5-LucR Reporter Cells Using Isolated T cell Effector Cells.
EC₅₀s - T Cells (μg/ml)

| | Donor | | | | | | | | | |
|---|---|---|---|---|---|---|---|---|---|---|
| | 4560 | 4408 | 4560 | 4408 | 4560 | 4408 | 4560 | 4408 | 4560 | 4408 |
| Ab \| Isolate | 7552 | | 8398 | | Bal | | 1489 | | 727 | |
| 265 | 0.014 | 0.001 | 0.008 | 0.002 | 0.005 | 0.001 | 0.016 | 0.007 | 0.015 | 0.004 |
| 251 | 0.123 | 0.004 | 0.018 | 0.011 | 0.010 | 0.005 | 0.033 | 0.042 | 0.032 | 0.011 |
| 259 | 0.158 | 0.064 | 0.081 | 0.032 | 0.043 | 0.013 | 0.110 | 0.141 | 0.082 | 0.039 |
| 258 | 0.512 | 0.774 | 0.467 | 0.328 | 0.349 | 0.167 | 0.797 | 1.082 | 1.096 | 0.633 |
| 260 | 1.125 | 1.508 | 4.234 | 4.026 | 1.023 | 0.496 | 3.581 | 7.090 | 1.009 | 20.730 |

[0495] The influence of CD3 affinity on CD3-bispecifics killing activity was assessed using HIV×CD3 bispecific molecules created using h3BNC117.52.64 as the Env-targeting arm and huSP34 (in scFv format) with a range of CD3 affinities as previously determined by BLI. The equilibrium dissociation constant (KD) of the CD3 Fabs used for creating the HIV×CD3 molecules are presented in Table 43.

TABLE 43
3BNC117 × CD3 Bispecific Panel and CD3 Binding
Affinity for Corresponding huSP34 Fab Variant

| Ab Name | huSP34 Fab − K_{D} (nM) |
|---|---|
| 237 | 2.49 |
| 230 | 13 |
| 238 | 45.3 |

[0496] The HIV-infected cell killing activity was evaluated using the CEM-NKr-CCR5-LucR+ lymphoblastoid reporter cell line infected with 5 different HIV-1 primary isolates as target cells and PBMCs from two healthy donors as effector cells. CEM-NKr-CCR5-LucR+ cells were infected for 3 days, washed and co-cultured with 3BNC117×CD3 bispecific molecules and PBMCs (25:1 effector: target cell ratio) for 2 days and expression of tat-driven luciferase was quantified using One-Glo luciferase reagent (Promega). The percent infected cell killing was calculated using the following equation:

100−((RLU of HIV-infected target cells in treated wells/RLU HIV-infected target cells in untreated wells)*100).

[0497] For concentration-response curves that had an apparent Eₘₐₓ<20%, the Eₘₐₓ values were reported as <20% and the EC₅₀ values reported as >100 μg/mL (maximum concentration tested).

[0498] The results are displayed in Table 44. FIG. 22 depicts a representative killing concentration-response curve (PV_12-infected cells, Donor 4622). Higher CD3 affinity was significantly correlated with lower killing EC₅₀ values (FIG. 23; r2=0.9968, P=0.0362). Thus, increasing CD3 affinity resulted in increased HIV×CD3 bispecific molecule-mediated killing potency.

TABLE 44
Killing EC₅₀ Values (μg/mL) of HIV-Infected
CEM-NKr-CCR5-LucR Reporter Cells.
EC₅₀s - (μg/ml)

| | Donor | | | | | | | | | |
|---|---|---|---|---|---|---|---|---|---|---|
| | 4622 | 4359 | 4622 | 4359 | 4622 | 4359 | 4622 | 4359 | 4622 | 4359 |
| Ab \| Isolate | PV_E1 | | PV_E3 | | PV_12 | | PV_13 | | PV_19 | |
| 237 | 1.34 | 0.01 | 0.22 | 0.67 | 0.02 | 0.33 | | 0.09 | 0.49 | 0.01 |
| 230 | 3.21 | 0.06 | 1.57 | 4.32 | 0.10 | 2.00 | 0.02 | 0.44 | 2.74 | 0.04 |
| 238 | >100 | 0.18 | 6.93 | 23.40 | 0.31 | 0.16 | 0.08 | 1.91 | 20.48 | 0.15 |

### Example 11

### In Vitro Killing of HIV-Infected Primary Cells or CEM Cells

[0499] PBMCs were isolated by ficoll separation from leukopaks from healthy donors (HIV−/HBV−/HCV−) and rested overnight. CD4+ T cells were isolated using the Stemcells EasySep Human CD4+ T Cell Enrichment Kit (Cat #19052). Isolated CD4+ T cells were spinfected with HIV isolates at 1200×g for 2 hrs and then cultured for 5 days to allow for de novo expression. Target cells were washed and 200,000 cells/well were plated and co-cultured with CD3-bsAb and 600,000 FITC membraned stained (Sigma Aldrich Cat #PKH67GL) PBMCs/well and incubated for 2 day. Cells were washed and stained with live/dead membrane stain (Thermo Fisher Cat #L34966) and α-CD4-BV711 (BD Biosciences Cat #563028). Cells were then fixed/permeabilized and stained with a-p24-PE (Beckman Coulter Cat #6604667) and read on a flow cytometer (BD LSRFortessa). The percent reduction in p24+CD4− live target cells was measured and quantified using the following equation:

100−((% p24+CD4− live target cells in treated wells/% p24+CD− live target cells in untreated wells)*100).

[0500] A panel of bispecific molecules was generated with a-CD3 SP34 derived sequences that had a range of affinities measured by SPR and the competition FACs assays and a common a-HIV envelope sequence. To determine if there was a correlation between the initially derived affinities of the α-CD3 SP34 derived sequences and the antibody mediated cytotoxicity, the bispecific molecules were run in the primary cell killing assay with CD4 cells infected with 2 different HIV isolates and autologous PBMCs obtained from a single donor. The results are depicted in FIGS. 24 and 25, and summarized in Table 45. PGT121.66×CD3 bispecific antibodies—CD3 affinity correlation to primary killing

TABLE 45
EC₅₀s values (μg/ml) of Primary HIV-infected
CD4+ Cells by PGT121.66 × huSP34 Bispecific
Antibodies Using PBMC Effector Cells.
EC₅₀ (μg/ml)

| Ab \| Isolate | 657 | 7552 |
|---|---|---|
| 265 | 0.275 | 0.011 |
| 251 | 1.610 | 0.107 |
| 259 | 2.368 | 0.123 |

CD4 ECD×CD3 bispecific molecule evaluation-Killing of HIV-infected CEM-NKr-CCr5-LucR+ CD4+ T cells in vitro.

[0501] To identify the CD4×α-CD3 bispecific formats that confer optimal redirected killing activity, we generated a panel of molecules with CD4 arm varying in domain composition or valency, paired with huSP34 in scFv or Fab format (Table 46, FIGS. 7B-7D).

TABLE 46
A Panel of CD4 ECD × α-CD3 Bispecific
Molecules Format Evaluation.

| | | | huSP34 |
|---|---|---|---|
| | CD4 arm | | arm |
| Ab name | domain | valency | format |
| 212 | D1D2 | 1 | ScFv |
| 211 | D1D2 | 1 | Fab |
| 213 | D1D2 | 2 (bivalent) | ScFv |
| 198 | D1.22 | 2 (tandem) | ScFv |
| 187 | D1.22 | 1 | Fab |
| 199 | D1.22 | 2 (bivalent) | ScFv |
| 186 | D1.22 | 1 | Fab |

[0502] The HIV-infected cell killing activity was evaluated using the CEM-NKr-CCR5-LucR+ lymphoblastoid reporter cell line infected with 3 different HIV-1 primary isolates as target cells and PBMCs from two healthy donors as effector cells. CEM-NKr-CCR5-LucR+ cells were infected for 3 days, washed and co-cultured with CD4×α-CD3 bispecific molecules and PBMCs (25:1 effector: target cell ratio) for 2 days and expression of tat-driven luciferase was quantified using One-Glo luciferase reagent (Promega). The percent infected cell killing was calculated using the following equation:

100−((RLU of HIV-infected target cells in treated wells/RLU HIV-infected target cells in untreated wells)*100).

[0503] For concentration-response curves that had an apparent Eₘₐₓ<20%, the Eₘₐₓ values were reported as <20% and the EC₅₀ values reported as >100 μg/mL (maximum concentration tested).

[0504] Table 47 and FIG. 26 summarize the EC50 values calculated from the killing curves for each bispecific test article against all three virus isolates by two donor PBMCs. Mean EC50 values for this panel range from 0.026 to 0.684 μg/ml. When different CD4 targeting domains were employed in otherwise identical molecules, namely D1.22 vs. D1D2 (e.g., 187 vs. 211, 199 vs. 213), EC₅₀ values were about 4-5-fold lower for D1.22-containing molecules, suggesting D1.22 is a more effective targeting arm for HIV-infected cells than their two-domain counterpart. The EC₅₀ value of 212 was ˜3-fold higher than that of 211; these two molecules employed identical CD4 targeting arm but varied in their huSP34 domain format (scFv vs. Fab), indicating huSP34 conferred more potent killing activity in scFv format than in Fab format in the context of these two molecules. When comparing EC₅₀ values of molecules harboring CD4 domains varying in valency and spatial arrangement, the result suggested that bivalent CD4 domain is more effective in targeting HIV-infected cells than their monovalent counterpart (e.g., 213 vs. 212), and that for molecules with two copies of CD4 domain, the “bivalent” configuration confers more potent killing activity than the “tandem” configuration (e.g., 199 vs. 198) (defined in FIG. 7D; Example 2).

TABLE 47
Killing EC₅₀ Values (μg/mL) of HIV-Infected
CEM-NKr-CCR5-LucR Reporter Cells.
EC₅₀s (μg/ml)

| | Donor | | | | | | Geomean |
|---|---|---|---|---|---|---|---|
| | 151 | 340 | 151 | 340 | 151 | 340 | (all donors/ |
| Ab \| Isolate | 302076 | | 7015 | | 7576 | | viruses) |
| 212 | 3.514 | 0.330 | 0.878 | 0.294 | 2.032 | 0.169 | 0.684 |
| 211 | 0.404 | 0.063 | 0.485 | 0.236 | 0.353 | 0.110 | 0.220 |
| 213 | 0.214 | 0.043 | 0.095 | 0.059 | 0.382 | 0.038 | 0.095 |
| 198 | 0.263 | 0.057 | 0.402 | 0.072 | 0.398 | 0.085 | 0.156 |
| 187 | 0.147 | 0.038 | 0.130 | 0.052 | 0.033 | 0.007 | 0.045 |
| 199 | 0.063 | 0.012 | 0.014 | 0.021 | 0.138 | 0.011 | 0.026 |
| 186 | 0.115 | 0.019 | 0.095 | 0.052 | 0.056 | 0.042 | 0.054 |

CD4 ECD×CD3 Bispecific Molecule-Mediated Killing of Primary CD4+ T Cells Infected with Different HIV Isolates

[0505] Killing of HIV infected cells by bispecific molecule 180 was evaluated and demonstrated in primary cell killing assays using primary CD4+ T cells that were infected with a panel of HIV isolates and autologous PBMCs as effector cells. Bispecific molecule 180 was tested alone or in combination with the bNAbs PGT121.42 (described in WO2017/106346) or h3BNC117.52.64 (described in WO2020/010107). To perform the assays, PBMCs were isolated by ficoll separation from leukopaks from healthy donors (HIV−/HBV−/HCV−) and rested overnight. CD4 cells were then isolated using the Stemcells EasySep Human CD4+ T Cell Enrichment Kit (Cat #19052). Isolated CD4 cells were spinfected with HIV isolates at 1200×g for 2 hrs and then cultured for 5 days to allow for de novo expression. Target cells were washed and 200,000 cells/well were plated and co-cultured in the presence or absence of different concentrations of the indicated antibodies with 600,000 FITC membraned stained (Sigma Aldrich Cat #PKH67GL) PBMCs/well for 2 days. Cells were washed and stained with live/dead membrane stain (Thermo Fisher Cat #L34966) and anti-CD4-BV711 (BD Biosciences Cat #563028). Cells were then fixed/permeabilized and stained with anti-p24-PE (Beckman Coulter Cat #6604667) and analyzed on a flow cytometer (BD LSRFortessa). p24+CD4− live target cells were quantified for each condition and the percent reduction in p24+CD4− live target cells relative to the control (no antibody) was determined using the following equation:

$$100 - ( ( \% p 24 + CD 4 - live target cells in treated wells / \% p 24 + CD - live target cells in untreated wells ) * 100 ) .$$

[0506] These results were used to determine killing EC₅₀ values for each antibody or antibody combination. Effective killing was defined as an EC₅₀ value of less than 50 g/mL. As shown in FIG. 27 and Table 48, PGT121.42 and h3BNC117.52.64 mediated killing of CD4+ T cells infected with 23/32 and 26/32 of the HIV isolates tested, respectively, with median EC₅₀ values of 0.21 and 0.41 μg/mL, respectively. Bispecific molecule 180 mediated killing of CD4+ T cells infected with 29/32 of the HIV isolates tested with a median EC₅₀ value of 0.12 μg/mL. Combining the bNAbs PGT121.42 and h3BNC117.52.64 in the assay mediated killing of CD4+ T cells infected with 28/32 of the HIV isolates tested with a median EC₅₀ value of 0.14 μg/mL. When all three bispecific molecules were combined in the assay, PGT121.42, h3BNC117.52.64 and bispecific 180 mediated killing of CD4+ T cells infected with all 32 of the HIV isolates tested with a median EC₅₀ value of 0.069 μg/mL (FIG. 27, Table 48). Based on these data, the triple combination was the most effective regimen tested in the in vitro killing assay as demonstrated by improved HIV isolate coverage and killing potency.

TABLE 48
Antibody-/Bispecific-Mediated Killing of Primary CD4+ T cells Infected
with Different HIV Isolates Using Autologous PBMCs as Effector Cells.
EC₅₀ (μg/mL)

| | | | | h3BNC117.52.64 + | h3BNC117.52.64 + |
|---|---|---|---|---|---|
| Virus | PGT121.42 | h3BNC117.52.64 | 180 | PGT121.42 | PGT121.42 + 180 |
| 1003 | 0.945 | 0.277 | 0.192 | 0.563 | 0.141 |
| 1413 | 100 | 0.317 | 0.624 | 0.905 | 0.070 |
| 7007 | 0.063 | 0.020 | 0.052 | 0.334 | 0.150 |
| 7015 | 0.096 | 0.579 | 0.265 | 0.111 | 0.129 |
| 7046 | 0.036 | 100 | 0.100 | 0.034 | 0.067 |
| 7103 | 0.003 | 0.318 | 0.384 | 0.045 | 0.038 |
| 7141 | 0.070 | 0.434 | 0.133 | 0.041 | 0.040 |
| 7467 | 0.030 | 0.021 | 0.041 | 0.022 | 0.027 |
| 7576 | 0.081 | 0.167 | 0.066 | 0.061 | 0.030 |
| 7595 | 0.705 | 1.435 | 0.013 | 0.160 | 0.012 |
| 7714 | 100 | 100 | 0.140 | 100 | 0.168 |
| 8084 | 11.290 | 1.984 | 100 | 1.294 | 0.140 |
| 8089 | 0.077 | 0.260 | 100 | 0.025 | 0.011 |
| 8106 | 0.047 | 0.507 | 0.026 | 0.012 | 0.005 |
| 8110 | 0.256 | 2.297 | 0.177 | 0.302 | 0.264 |
| 8134 | 0.119 | 0.079 | 0.051 | 0.047 | 0.038 |
| 8176 | 0.031 | 0.171 | 0.993 | 0.031 | 0.056 |
| 8320 | 1.334 | 0.335 | 0.494 | 0.679 | 0.109 |
| 8331 | 0.172 | 0.269 | 0.133 | 0.127 | 0.120 |
| 8339 | 100 | 0.393 | 0.075 | 0.570 | 0.074 |
| 302076 | 100 | 1.799 | 1.771 | 1.520 | 1.502 |
| BaL | 0.048 | 0.055 | 0.050 | 0.039 | 0.031 |
| PV10 | 100 | 100 | 0.052 | 100 | 0.036 |
| PV57 | 0.023 | 0.312 | 0.969 | 0.050 | 0.020 |
| PV58 | 100 | 0.799 | 0.096 | 0.520 | 0.103 |
| PV59 | 100 | 1.912 | 0.111 | 1.960 | 0.113 |
| PV61 | 0.241 | 100 | 0.032 | 0.389 | 0.093 |
| PV63 | 0.036 | 0.107 | 0.570 | 0.026 | 0.037 |
| PV65 | 0.088 | 0.547 | 100 | 0.082 | 0.106 |
| PV70 | 100 | 100 | 0.022 | 100 | 0.097 |
| PV72 | 100 | 100 | 0.113 | 100 | 0.029 |
| PVE2 | 5.557 | 0.041 | 0.043 | 0.065 | 0.040 |

### Example 12

### Characterization of Infected CEM Cell Binding In Vitro

[0507] We evaluated the binding of three HIV×α-CD3 bispecific molecules harboring different Env-targeting specificities to surface expressed Env on HIV-infected cells (Table 49).

TABLE 49
Bispecific Molecules Evaluated in this Example.

| Bispecific | |
|---|---|
| Name | Features |
| 186 | hCD4 D1.22 Fc AAS + W/huSP34.1.3 AAS + SAV + R |
| 255 | hPGT121.66 W/huSP34.1.3scFv SAV + R |
| 230 | h3BNC117.52.64 AAS + W/huSP34.1.3scFv AAS + SAV + R |

[0508] The HIV-infected cell binding activity was evaluated using the CEM-NKr-CCR5-LucR+ lymphoblastoid reporter cell line infected with 24 different HIV-1 primary isolates. CEM-NKr-CCR5-LucR+ cells were infected for 3 days, washed and co-incubated with different concentrations of HIV×α-CD3 bispecific molecules for 1 hour. Cells were then washed and stained with α-huIgG-APC (Jackson ImmunoResearch Cat #109-136-098), α-CD4-BV711 (BD Biosciences Cat #563028), and α-CD8-APC-Cy7 (BD Biosciences Cat #560179). Cells were then washed, fixed/permeabilized and analyzed using a BD LSRFortessa instrument. The percentage of cells that were α-huIgG-APC positive as well as the mean fluorescence intensity (mFI) values of α-huIgG-APC of all samples were collected. Binding curves were generated and EC₅₀ values analyzed using GraphPad Prism.

[0509] As summarized in FIG. 28 and Table 50, bispecific molecules 186 and 180, bearing the CD4 D1.22 Env-targeting arm, exhibited the highest binding potency against HIV-1-infected CEM-NKr-CCR5-LucR+ cells with a geometric mean of the EC₅0 values of all isolates tested of 7.2 nM and 21.39, respectively, while the geometric means of the EC₅ values for bispecific molecules 255 and 230 were 68.8 nM and 99.1 nM, respectively. This result demonstrated that all four Env-binding specificities bind to HIV Env expressing cells and that the CD4 D1.22 domain exhibits the most potent binding affinity when evaluating this panel of HIV isolates.

TABLE 50
EC₅₀ Values of Binding Curves for 24 Virus Isolate-
Infected Cells of Four Bispecific Molecules Tested.
EC₅₀ (mFI) of α-huIgG+ (nM)

| Ab \| Isolate | 186 | 255 | 230 | 180 |
|---|---|---|---|---|
| PVE4 | 7.54 | 58.10 | 115.60 | 65.11 |
| PV72 | 8.16 | 89.13 | 196.30 | 66.86 |
| PV71 | 2.35 | 89.07 | 78.43 | 14.97 |
| PV23 | 4.62 | 47.12 | 102.30 | 15.40 |
| 302076 | 2.78 | 108.90 | 16.04 | 17.87 |
| 8339 | 66.90 | 132.80 | 29.05 | n/d* |
| 8331 | 83.55 | 100.30 | 60.32 | n/d |
| 8320 | 11.10 | 154.20 | 165.00 | 10.74 |
| PV59 | 9.99 | 477.50 | 139.80 | 7.31 |
| 7015 | 7.63 | 158.80 | 82.41 | n/d |
| 7141 | 2.50 | 11.41 | 194.70 | 12.82 |
| 7467 | 7.98 | 31.51 | 12.70 | 43.64 |
| 8318 | 17.35 | 115.50 | 142.30 | 5.60 |
| PV58 | 10.30 | 564.30 | 350.70 | 21.26 |
| 7015 | 2.86 | 1426.00 | 103.10 | n/d |
| 8110 | 5.28 | 75.48 | 64.44 | 11.30 |
| 7007 | 5.40 | 40.42 | 1156.00 | 62.13 |
| 7576 | 8.43 | 64.50 | 177.90 | 46.74 |
| 7103 | 6.65 | 6.92 | 41.88 | 30.87 |
| 8176 | 7.62 | 8.24 | 20.29 | 45.61 |
| PV62 | 2.77 | 100.00 | 67.05 | 15.16 |
| PV64 | 4.39 | 20.22 | 3509.00 | 10.73 |
| PV63 | 2.32 | 13.65 | 26.27 | 40.34 |
| PV66 | 13.11 | 32.62 | 92.99 | 14.13 |
| Geomean | 7.22 | 68.75 | 99.08 | 21.39 |

*n/d = not determined

### Example 13

### Pharmacokinetics of HIV-Targeted CD3 Bispecific Molecules

[0510] Selected anti-gp120 and CD4 D1.22 targeted anti-CD3 bispecific antibodies were administered by intravenous (IV) bolus injection to naïve male cynomolgus or rhesus macaque monkeys (Covance, TX) to characterize their PK and ADA profiles after single or repeat dosing. Serum samples collected from monkeys were analyzed using a selective bioanalytical method of sufficient sensitivity to determine serum concentration-time profiles and mean serum PK parameters by non-compartmental analysis (NCA). The bioanalytical method utilized clade B gp120 antigen (Immune-tech, CA) as a capture reagent and biotin conjugated goat anti-human IgG antibody (Southern Biotech, AL) as a secondary reagent, with SULFOTAG labeled Streptavidin (MesoScale Discovery, MD) for electrochemical detection on a Mesoscale Discovery Quickplex SQ 120 plate reader. The serum concentration time profiles for anti-gp120×CD3 bispecific molecules are shown in FIGS. 29-32. CD4 D1.22×CD3 bispecific molecules serum concentration time profiles are shown in FIG. 33. Aberrant declines in exposure to levels below the limit of quantification was attributed to the formation of ADA and in certain instances aberrant concentration time points were removed from the PK analysis. The calculated NCA PK parameters for anti-gp120 and CD4 D1.22 targeted CD3 bispecific antibodies are presented in Tables 51 and 52, respectively.

[0511] The anti-gp120 antibody, PGT121.66, was evaluated in the context of a comparator bispecific platform containing the comparator #6 huSP34 variable domain (comparator 6 bispecific antibody). The comparator #6 bispecific antibody was found to have IgG-like PK (Cl≈12.5 mL/day/kg) in cynomolgus monkeys, but also a high rate of ADA in nearly every animal and context tested. The high rate of ADA was not mitigated by various common strategies such as repeat loading (up to 30 mg/kg), concomitant subcutaneous administration with the immunosuppressant methotrexate, or by chimerization with a simian IgG1 Fc, and the ADA was observed in both cynomolgus and rhesus monkeys. Introduction of FcRn enhancing mutations (LS and YTE) also did not reduce the ADA incidence or improve the exposure. Such a high rate of NHP ADA can limit the nonclinical pharmacological assessment and introduce unwanted immunogenicity related toxicities which may or may not be predictive of the clinical outcome thus complicating the development path.

[0512] Selected PGT121 scFv-Fc/Fab-Fc bispecific antibodies from the first and second round of huSP34 engineering were evaluated for PK and ADA in cynomolgus monkeys (Table 51). In all cases, the anti-gp120 binding domain was formatted as a Fab, while the huSP34 anti-CD3 epsilon binding domain was formatted as an scFv. In contrast to the representative Comparator 6 bispecific generated using an identical PGT121.66 anti-gp120 binding domain, and where all animals developed ADA (FIG. 29), the huSP34.1.3 scFv bispecifics 250, 252, and 251 were found to have comparable IgG-like PK and no incidence of ADA. The Cl for 250 (10.4 mL/day/kg) was slightly improved over 252 (14.1 mL/day/kg) and 251 (18.1 mL/day/kg) which have Fc mutations which remove Fc Protein A binding, but none of the huSP34.1.3 treated animals (n=9) had observable ADA. Modifications to increase the potency (FIG. 30) were found in some instances to increase the ADA incidence and reduce the exposure (264, 265, and 261). While Fc mutations to improve the PK such as LS had no impact (263), or a modest 2-fold improvement in the case of YTE (262), the higher potency variants generally had lower exposure and a higher rate of ADA. Bispecifics selected based on CD3 affinity and BVP ELISA results from the third round of huSP34 optimization were next evaluated in cynomolgus monkeys (FIG. 31). In contrast to previous literature reports (Leong et. al, 2017), there was no relationship of CD3 affinity and antibody clearance since the lowest potency bispecific 257 (Cl=10.5 mL/day/kg) had comparable clearance to the two highest CD3 affinity bispecifics 256 (10.7 mL/day/kg) and 243 (Cl=8.23 mL/day/kg). It was observed that the best correlate of PK outcome was with BVP score (Example 7).

[0513] The huSP34 variant 3.13 with the longest serum half-life and no detectable ADA (243) was further engineered to remove Protein A binding in the CD3 variable domain and scFv-Fc/Fab-Fc bispecific antibodies containing these variants were next evaluated in cynomolgus monkey (FIG. 32). Of the Protein A knockout bispecific variants evaluated 249 had the longest serum half-life (CL 34.4 mL/day/kg), but reduced exposure (˜4-fold) relative to 243. To confirm the excellent PK properties of the huSP34.3.13 variant it was evaluated in the context of a second anti-gp120 targeting bNAb (185). The bispecific 185 as was found to retain the excellent IgG-like PK properties (Cl=8.7 mL/day/kg).

TABLE 51
Non-Compartmental Analysis (NCA) of Anti-Gp120 × Anti-CD3 Bispecific
Antibodies After IV Bolus Administration to Naïve Male Cynomolgus.

| Bispecific | Dose | | Cl | Vz | Half-life | |
|---|---|---|---|---|---|---|
| Name | (mg/kg) | N | (mL/day/kg) | (mL/kg) | (day) | ADA |
| Comparator #6 | 30^{a} | 5 | 12.5 ± 1.1* | 84.4 ± 7.40* | 4.70 ± 0.70* | 5 |
| 250 | 1 | 3 | 10.4 ± 1.78 | 133 ± 10.7 | 9.07 ± 1.56 | 0 |
| 252 | 1 | 3 | 14.1 ± 2.52 | 146 ± 17.0 | 7.26 ± 0.526 | 0 |
| 251 | 1 | 3 | 18.2 ± 2.84 | 203 ± 36.8 | 7.68 ± 0.273 | 0 |
| 265 | 1 | 3 | 21.6 ± 2.23* | 172 ± 53.0* | 5.46 ± 1.22* | 3 |
| 264 | 1 | 3 | 21.7 ± 1.97* | 178 ± 40.2* | 5.75 ± 1.58* | 3 |
| 261 | 1 | 3 | 18.4 ± 1.98 | 158 ± 43.8 | 5.89 ± 0.999 | 1 |
| 262 | 1 | 3 | 10.2 ± 2.42* | 100 ± 25.2* | 7.37 ± 3.49* | 3 |
| 263 | 1 | 3 | 17.8 ± 3.68* | 146 ± 93.7* | 5.41 ± 2.47* | 3 |
| 257 | 1 | 2 | 10.5 | 97.7 | 6.41 | 0 |
| 274 | 1 | 2 | 23.3 | 152 | 4.57 | 0 |
| 273 | 1 | 2 | 43.6 | 280 | 4.45 | 0 |
| 275 | 1 | 2 | 45.2 | 395 | 6.14 | 0 |
| 256 | 1 | 2 | 10.7 | 84.1 | 5.47 | 1 |
| 243 | 1 | 2 | 8.23 | 71.2 | 5.98 | 0 |
| 249 | 1 | 2 | 34.4 | 216 | 6.41 | 0 |
| 276 | 1 | 2 | 58.7 | 376 | 4.35 | 0 |
| 277 | 1 | 2 | 59.7 | 314 | 4.47 | 0 |
| 218 | 1 | 3 | 8.73 ± 2.27 | 129 ± 45.5 | 11.0 ± 6.12 | 1 |

^{a}Dosed on day 0 and day 7
*PK analysis impacted by evidence of ADA

[0514] Next, ECD-Fc/Fab-Fc bispecific antibodies incorporating the CD4 D1.22 ECD and huSP34 variant Fabs were tested in NHP PK studies. These molecules were generated with and without Fc mutations designed to enhance pH dependent FcRn binding and with huSP34.1.3 or huSP34.3.13 anti-CD3 binding arms, or variants thereof containing variable domain Protein A knockout mutations (Table 52 and FIG. 33). Variants with (187) or without (186) FcRn mutations had comparable IgG-like PK, with Cl of 12.0 and 13.3 mL/day/kg, respectively. In contrast to the results obtained with the scFv-Fc/Fab-Fc bispecific antibodies incorporating the PGT121 derived anti-gp120 targeting domain, ECD-Fc/Fab-Fc variants with (180) or without (185) huSP34 variable domain Protein A knockout mutations showed comparable IgG-like PK with Cl of 14.4 and 17.0 mL/day/kg, respectively.

TABLE 52
NCA of CD4 × Anti-CD3 Bispecific Antibodies After 1 mg/kg
IV Bolus Administration to Naïve Male Cynomolgus Monkeys.

| Bispecific | Dose | | Cl | Vz | Half-life | |
|---|---|---|---|---|---|---|
| Name | (mg/kg) | N | (mL/day/kg) | (mL/kg) | (day) | ADA |
| 186 | 1 | 3 | 13.3 ± 3.62 | 89.5 ± 23.6 | 4.72 ± 0.184 | 2 |
| 187 | 1^{a} | 3 | 12.0 ± 2.82 | 87.9 ± 17.2 | 5.14 ± 0.871 | 1 |
| 180 | 1 | 3 | 14.4 ± 0.508 | 162 ± 18.5 | 7.80 ± 0.718 | 2 |
| 182 | 1 | 3 | 24.8 ± 4.22* | 162 ± 54.5* | 4.78 ± 2.35* | 3 |
| 185 | 1 | 3 | 17.0 ± 3.49* | 99.3 ± 23.1* | 4.03 ± 0.148* | 3 |

^{a}Dosed on day 0 and day 14
*PK analysis impacted by evidence of ADA

### Example 14

### Expression Vector Organization for the Production of Asymmetrical Bispecific Molecules Having Three Polypeptide Chains

[0515] Bispecific molecule having anti-HIV gp120 Fab and anti-CD3 scFv. A bispecific molecule binding to CD3 and HIV gp120 and having three polypeptide chains, namely a heavy chain (HC) and a light chain (LC) of a Fab that binds to gp120 and a single-chain variable fragment (scFv) that binds to CD3, as described herein, was expressed from a single tricistronic plasmid vector (including two additional cistrons for expressing a eukaryotic selection marker and a prokaryotic selection marker). The expression of each polypeptide was driven by its own promotor, each promoter of equal transcription strength (e.g., a cytomegalovirus (CMV) promoter). The vector organization is illustrated in FIG. 34. The cistrons or expression cassettes are arranged 5′ to 3′ from the replication origin as: (1) a prokaryotic selection marker translated on the reverse or negative strand; and translated on the forward or positive strand (2) a eukaryotic selection marker (e.g., glutamine synthetase (GS); (3) a Fab light chain; (4) a Fab heavy chain; and (5) an scFv-Fc fusion protein. The expression vector was introduced into a Chinese Hamster Ovary (CHO) mammalian cell line, where the endogenous glutamine synthetase (GS) gene was eliminated. Expression of glutamine synthetase from the introduced vector was utilized as a selection marker when culturing the cells using the media without L-glutamine. The expression of bispecific molecules was measured by Protein A (ProA) Biosensors, while the desired format (i.e., assembly of the Fab heavy and light chains and the scFv-Fc fusion protein) of bispecific molecules was further selected using size separation. As shown in FIG. 35, various clones were propagated for 30 days (aged population, D30) and fed-batch production expression performance was evaluated and compared with the parental clones (D0). The results demonstrate that this platform enabled stable and high expression (specific titer >1 g/L, as calculated by the amount of total bispecific molecule detected via ProA Biosensors and then multiplied by the heterotrimer %) of this molecule.

[0516] Bispecific molecule having anti-CD3 Fab and CD4 extracellular (EC) domain-Fc fusion protein. A bispecific molecule binding to CD3 and HIV gp120 and having three polypeptide chains, namely a heavy chain (HC) and a light chain (LC) of a Fab that binds to CD3 and a CD4 extracellular domain-Fc fusion protein, described herein, was expressed from a single tricistronic plasmid vector (including two additional cistrons for expressing a eukaryotic selection marker and a prokaryotic selection marker). The expression of each polypeptide was driven by its own promotor, each promoter of equal transcription strength (e.g., a CMV promoter). The vector organization is illustrated in FIG. 36. The cistrons or expression cassettes are arranged 5′ to 3′ from the replication origin as: (1) a prokaryotic selection marker translated on the reverse or negative strand; and translated on the forward or positive strand (2) a eukaryotic selection marker (e.g., GS; (3) a Fab light chain; (4) a Fab heavy chain; and (5) a CD4 EC domain-Fc fusion protein. The expression vector was introduced into a CHO mammalian cell line, where the endogenous GS gene was eliminated. Expression of glutamine synthetase from the introduced vector was utilized as a selection marker when culturing the cells using the media without L-glutamine. The expression of bispecific molecules was measured by ProA Biosensors, while the desired format (i.e., assembly of the Fab heavy and light chains and the CD4 EC-Fc fusion protein) of bispecific molecules was further selected using size separation. As shown in FIG. 37, various clones were evaluated, and the results demonstrate high expression (specific titer >1 g/L) of this molecule.

### Example 15

### Bispecific Antibody and TLR7 Agonist Combination can Prevent Viral Rebound in Chronically SHIV-Infected Monkeys

[0517] Viral replication can be efficiently suppressed by ART in HIV-1 infected individuals, however, a viral reservoir in latently infected CD4+ T lymphocytes is formed very early during infection (Colb, et al., Nat Med (2018) 24(7):923-6; Finzi, et al., Science (1997) 278(5341):1295-300; Siliciano, et al., Nat Med (2003) 9(6):727-8; and Wong, et al., Science (1997) 278(5341):1291-5). This viral reservoir represents a challenge for the development of a cure to HIV-1 and various strategies to target the viral reservoir are being investigated including pairing anti-HIV antibodies and immune modulators (Barouch, et al., Science (2014) 345(6193):169-74; Deeks, et al., Nat Med 2016; 22 (8):839-50). A combination of vesatolimod (VES) and the HIV-1 bNAb PGT121 has been shown to delay or prevent viral rebound in SHIV-infected rhesus macaques following ART discontinuation {Borducchi, et al., Nature (2018) 563(7731):360-4; Tsa, et al., J Virol (2017) 91(8):e02166-16; and Walker, et al., Nature (2011) 477 (7365):466-70).

[0518] A bispecific PGT121/anti-CD3 generated in the DUOBODY® platform (Labrijn, et al., Proc Natl Acad Sci USA. (2013) 110(13):5145-50) that contained a PGT121 Fv (for SHIV envelope recognition), an anti-CD3 Fv (for T-cell effector cell recruitment) and a rhesus Fc domain was dosed in combination with VES in SHIV-infected rhesus macaques (Macaca mulatta) on ART. Prior to dosing, the rhesus macaques were infected for 1 year followed by 2.5 years of ART. Animals received 2 biweekly doses of a CD3-inactive bispecific PGT121/anti-CD3KO (intravenous infusions of 5 mg/kg) followed by 10 biweekly doses of bispecific PGT121/anti-CD3 (intravenous infusions of 5 mg/kg). VES (oral administrations of 0.15 mg/kg) was given simultaneously for 10 doses with the first administration on the day of the first bispecific PGT121/anti-CD3 administration. The bispecific PGT121/anti-CD3KO was included to tolerize the animals to the bispecific antibody as previously described (Somerfield, et al., J Immunol (2010) Jul. 1; 185(1):763-8). A sham group (saline placebo administrations) of 7 ART suppressed SHIV-infected rhesus macaques was included as controls.

[0519] Despite the administration of the bispecific PGT121/anti-CD3KO antibody, animals developed extensive anti-drug antibodies (ADAs) during the planned dosing period. Due to loss of exposure dosing was prematurely halted in three animals after the fourth, fifth and sixth dose of the bispecific PGT121/anti-CD3 antibody. Prior to the emergence of ADA, antibody serum concentrations had reached between 70 and 180 μg/mL 30 minutes post dosing and declined to between 1.7 and 11 μg/mL two weeks post dosing (FIG. 38). Two weeks following the last bispecific PGT121/anti-CD3 dose, all animals had serum concentrations below 1 μg/mL except one animal with a serum concentration of 2.3 μg/mL.

[0520] Twenty weeks after the final antibody dosing, ART was discontinued and animals were monitored for 24 weeks (168 days) to assess for viral rebound (FIG. 39). In the sham group, 7 of 7 animals rebounded and remained viremic in the 24 weeks monitoring. In contrast, in the bispecific-PGT121/anti-CD3/VES group, 1 of 9 animals did not rebound and three animals that initially rebounded re-suppressed. CD8+ T and NK cell depletion (intravenous infusion of an anti-CD8a CDR-grafted rhesus IgG1 antibody) did not identify any residual replication competent virus as the bispecific-PGT121/anti-CD3/VES treated animal that did not rebound following ART discontinuation remained aviremic (FIG. 40). In contrast, CD8+ T and NK cell depletion in 4 of the animals that rebounded following ART discontinuation resulted in plasma virus spikes in all animals, including 3 animals that were aviremic at the time of depletion demonstrating that in these animals, viral control was CD8+ T or NK cell mediated (FIG. 40).

[0521] The results are consistent with the conclusion that treatment of SHIV infected animals initiating ART during chronic infection with a bispecific-PGT121/anti-CD3 antibody in combination with the immune modulator VES resulted in suppression of viral rebound and/or virus control in a subset of animals following discontinuation of ART.

TABLE 53
Summary of Bispecific CD3 × gp120 Antigen Binding Molecules

| Bispecific | | SEQ ID NO: | SEQ ID NO: | SEQ ID NO: |
|---|---|---|---|---|
| Name | Features | unpaired HC | Fab arm-HC | Fab arm-LC |
| 180 | hCD4 D1.22 Fc AAS + W + YTE/huSP34.39.13 AAS + SAV + R | 751 | 752 | 753 |
| 181 | hCD4 D1.22 Fc AAS + W/huSP34.39.13 AAS + SAV + R | 754 | 752 | 753 |
| 182 | hCD4 D1.22 Fc AAS + SAV + R/huSP34.3.13 AAS + W + YTE | 755 | 756 | 753 |
| 183 | hCD4 D1.22 Fc AAS + SAV + R/huSP34.3.13 AAS + W | 755 | 757 | 753 |
| 184 | hCD4 D1.22 Fc AAS + SAV/huSP34.3.13 AAS + W | 758 | 757 | 753 |
| 185 | hCD4 D1.22 Fc AAS + SAV + YTE/huSP34.3.13 AAS + W + YTE | 759 | 756 | 753 |
| 186 | hCD4 D1.22 Fc AAS + W/huSP34.1.3 AAS + SAV + R | 754 | 760 | 761 |
| 187 | hCD4 D1.22 Fc AAS + W + LS/huSP34.1.3 AAS + SAV + R | 762 | 760 | 761 |
| 188 | hCD4 D1.22 Fc AAS + W + YTE/huSP34.40.13 AAS + SAV + R | 751 | 763 | 753 |
| 189 | hCD4 D1.22 Fc AAS + W + YTE/huSP34.41.13 AAS + SAV + R | 751 | 901 | 753 |
| 190 | hCD4 D1.22(tandem) Fc AAS + W + YTE/huSP34.39.13 AAS + SAV + R | 764 | 752 | 753 |
| 191 | hCD4 D1.22(tandem) Fc AAS + W/huSP34.39.13 AAS + SAV + R | 765 | 752 | 753 |
| 192 | hCD4 D1.22(tandem) Fc AAS + SAV + R/huSP34.3.13 AAS + W + YTE | 766 | 767 | 753 |
| 193 | hCD4 D1.22(tandem) Fc AAS + SAV + R/huSP34.3.13 AAS + W | 766 | 768 | 753 |
| 194 | hCD4 D1.22(tandem) Fc AAS + SAV/huSP34.3.13 AAS + W | 769 | 768 | 753 |
| 195 | hCD4 D1.22(tandem) Fc AAS + SAV + YTE/huSP34.3.13 AAS + W + YTE | 770 | 767 | 753 |
| 196 | hCD4 D1.22(tandem) Fc AAS + W/huSP34.1.3 + SAV + R | 765 | 771 | 761 |
| 197 | hCD4 D1.22(tandem) Fc AAS + W + LS/huSP34.1.3 AAS + SAV + R | 772 | 771 | 761 |
| 198 | hCD4-D1.22(tandem) Fc AAS + W + LS/huSP34.1.3scFv AAS + SAV + R | 772 | 773 | |
| 199 | hCD4-D1.2(bivalent) AAS + W + LS/huSP34.1.3scFv AAS + SAV + R | 774 | 775 | 776 |
| 200 | hCD4 D1.22(bivalent) AAS + SAV + R/huSP34.3.13scFv AAS + W + YTE | 777 | 778 | 776 |
| 201 | hCD4 D1.22(bivalent) AAS + SAV + R/huSP34.3.13scFv AAS + W | 779 | 778 | 776 |
| 202 | hCD4 D1.22(bivalent) AAS + SAV/huSP34.3.13scFv AAS + W | 779 | 780 | 776 |
| 203 | hCD4 D1.22(bivalent) AAS + SAV + YTE/huSP34.3.13scFv AAS + W + YTE | 777 | 781 | 776 |
| 204 | hCD4 D1D2 Fc AAS + W + YTE/huSP34.39.13 AAS + SAV + R | 782 | 752 | 753 |
| 205 | hCD4 D1D2 Fc AAS + W/huSP34.39.13 AAS + SAV + R | 783 | 752 | 753 |
| 206 | hCD4 D1D2 Fc AAS + SAV + R/huSP34.3.13 AAS + W + YTE | 784 | 785 | 753 |
| 207 | hCD4 D1D2 Fc AAS + SAV + R/huSP34.3.13 AAS + W | 784 | 786 | 753 |
| 208 | hCD4 D1D2 Fc AAS + SAV/huSP34.3.13 AAS + W | 787 | 786 | 753 |
| 209 | hCD4 D1D2 Fc AAS + SAV + YTE/huSP34.3.13 AAS + W + YTE | 788 | 785 | 753 |
| 210 | hCD4 D1D2 Fc AAS + W/huSP34.1.3 AAS + SAV + R | 783 | 789 | 761 |
| 211 | hCD4-D1D2 Fc AAS + W + LS/huSP34.1.3 AAS + SAV + R | 790 | 789 | 761 |
| 212 | hCD4-D1D2 Fc AAS + W + LS/huSP34.1.3scFv AAS + SAV + R | 790 | 791 | |
| 213 | hCD4-D1D2(bivalent) AAS + W + LS/huSP34.1.3scFv AAS + SAV + R | 792 | 793 | 794 |
| 214 | hCD4-D1D2(bivalent) AAS + SAV + R/huSP34.3.13scFv AAS + W + YTE | 795 | 796 | 794 |
| 215 | hCD4-D1D2(bivalent) AAS + SAV + R/huSP34.3.13scFv AAS + W | 797 | 796 | 794 |
| 216 | hCD4-D1D2(bivalent) AAS + SAV/huSP34.3.13scFv AAS + W | 797 | 798 | 794 |
| 217 | hCD4-D1D2(bivalent) AAS + SAV + YTE/huSP34.3.13scFv AAS + W + YTE | 795 | 799 | 794 |
| 218 | h3BNC117.52.64 AAS + SAV + YTE/huSP34.3.13 scFv AAS + W + YTE | 800 | 801 | 802 |
| 219 | h3BNC117.52.64 AAS + SAV + R/huSP34.3.13scFv AAS + W + YTE | 800 | 803 | 802 |
| 220 | h3BNC117.52.64 AAS + SAV + R/huSP34.3.13scFv AAS + W | 804 | 803 | 802 |
| 221 | h3BNC117.52.64 AAS + SAV/huSP34.3.13scFv AAS + W | 804 | 805 | 802 |
| 222 | h3BNC117.52.64 AAS + SAV + YTE/huSP34.39.13 scFv AAS + W + YTE | 806 | 801 | 802 |
| 223 | h3BNC117.52.64 AAS + SAV + R/huSP34.39.13scFv AAS + W + YTE | 806 | 803 | 802 |
| 224 | h3BNC117.52.64 AAS + SAV + R/huSP34.39.13scFv AAS + W | 807 | 803 | 802 |
| 225 | h3BNC117.52.64 AAS + SAV/huSP34.39.13scFv AAS + W | 807 | 805 | 802 |
| 226 | h3BNC117.52.64 AAS + W + YTE/huSP34.39.13scFv AAS + SAV + R | 808 | 809 | 802 |
| 227 | h3BNC117.52.64 AAS + W/huSP34.39.13scFv AAS + SAV + R | 808 | 810 | 802 |
| 228 | h3BNC117.52.64 AAS + SAV + YTE/huSP34.1.3scFv AAS + W + YTE | 811 | 801 | 802 |
| 229 | h3BNC117.52.64 AAS + W + YTE/huSP34.1.3 scFv AAS + SAV + R | 812 | 809 | 802 |
| 230 | h3BNC117.52.64 AAS + W/huSP34.1.3scFv AAS + SAV + R | 812 | 810 | 802 |
| 231 | h3BNC117.52.64 AAS + SAV/huSP34.1.3scFv AAS + W | 813 | 805 | 802 |
| 232 | h3BNC117.52.64 AAS + W + LS/huSP34.1.3 scFv AAS + SAV + R | 812 | 814 | 802 |
| 233 | h3BNC117.52.64 AAS + SAV + YTE/huSP34.3.8scFv AAS + W + YTE | 815 | 801 | 802 |
| 234 | h3BNC117.52.64 AAS + SAV/huSP34.3.8scFv AAS + W | 816 | 805 | 802 |
| 235 | h3BNC117.52.64 AAS + SAV + YTE/huSP34.34.3scFv AAS + W + YTE | 817 | 801 | 802 |
| 236 | h3BNC117.52.64 AAS + SAV/huSP34.34.3scFv AAS + W | 818 | 805 | 802 |
| 237 | h3BNC117.52.64 AAS + W/huSP34.13.8scFv AAS + SAV + R | 819 | 810 | 802 |
| 238 | h3BNC117.52.64 AAS + W/huSP34.4.2scFv AAS + SAV + R | 820 | 810 | 802 |
| 239 | hPGT121.66 AAS + SAV + YTE/huSP34.3.13scFv AAS + W + YTE | 821 | 822 | 823 |
| 240 | hPGT121.66 AAS + SAV + R/huSP34.3.13scFv AAS + W + YTE | 824 | 825 | 823 |
| 241 | hPGT121.66 AAS + SAV + R/huSP34.3.13scFv AAS + W | 826 | 825 | 823 |
| 242 | hPGT121.66 AAS + SAV/huSP34.3.13scFv AAS + W | 826 | 827 | 823 |
| 243 | hPGT121.66 AAS + W/huSP34.3.13scFv AAS + SAV + R | 828 | 829 | 823 |
| 244 | hPGT121.66 AAS + SAV + YTE/huSP34.39.13scFv AAS + W + YTE | 830 | 822 | 823 |
| 245 | hPGT121.66 AAS + SAV + R/huSP34.39.13scFv AAS + W + YTE | 830 | 825 | 823 |
| 246 | hPGT121.66 AAS + SAV + R/huSP34.39.13scFv AAS + W | 831 | 825 | 823 |
| 247 | hPGT121.66 AAS + SAV/huSP34.39.13scFv AAS + W | 831 | 827 | 823 |
| 248 | hPGT121.66 AAS + W + YTE/huSP34.39.13scFv AAS + SAV + R | 832 | 833 | 823 |
| 249 | hPGT121.66 AAS W/huSP34.39.13 scFv AAS + SAV + R | 832 | 829 | 823 |
| 250 | hPGT121.66 AAS + SAV/huSP34.1.3 scFv AAS + W | 834 | 827 | 823 |
| 251 | hPGT121.66 AAS + W/huSP34.1.3 scFv AAS + SAV + RF | 835 | 829 | 823 |
| 252 | hPGT121.66 AAS + W/huSP34.1.3 scFv AAS + SAV + R | 836 | 829 | 823 |
| 253 | hPGT121.66 AAS + W + YTE/huSP34.1.3 scFv AAS + SAV + R | 837 | 833 | 823 |
| 254 | hPGT121.66 AAS + W + LS/huSP34.1.3 scFv AAS + SAV + R | 837 | 838 | 823 |
| 255 | hPGT121.66 W/huSP34.1.3scFv SAV + R | 839 | 840 | 823 |
| 256 | hPGT121.66 AAS + W/huSP34.3.8 scFv AAS + SAV + R | 841 | 829 | 823 |
| 257 | hPGT121.66 AAS + W/huSP34.34.3 scFv AAS + SAV + R | 842 | 829 | 823 |
| 258 | hPGT121.66 AAS + W/huSP34.3.4 scFv AAS + SAV + RF | 843 | 829 | 823 |
| 259 | hPGT121.66 AAS + W/huSP34.3.6scFv AAS + SAV + RF | 844 | 829 | 823 |
| 260 | hPGT121.66 AAS + W/huSP34.8.3 scFv AAS + SAV + RF | 845 | 829 | 823 |
| 261 | hPGT121.66 AAS + W/huSP34.13.8 scFv AAS + SAV + R | 846 | 829 | 823 |
| 262 | hPGT121.66 AAS + W + YTE/huSP34.13.8 scFv AAS + SAV + R | 846 | 833 | 823 |
| 263 | hPGT121.66 AAS + W + LS/huSP34.13.8 scFv AAS + SAV + R | 846 | 838 | 823 |
| 264 | hPGT121.66 AAS + SAV/huSP34.13.10scFv AAS + W | 847 | 827 | 823 |
| 265 | hPGT121.66 AAS + W/huSP34.13.10 scFv AAS + SAV + RF | 848 | 829 | 823 |
| 266 | hPGT121.66 AAS + W/huSP34.14.8scFv AAS + SAV + R | 849 | 829 | 823 |
| 267 | hPGT121.66 AAS + W/huSP34.19.8scFv AAS + SAV + R | 850 | 829 | 823 |
| 268 | hPGT121.66 AAS + W/huSP34.25.8scFv AAS + SAV + R | 851 | 829 | 823 |
| 269 | hPGT121.66 AAS + W/huSP34.26.8scFv AAS + SAV + R | 852 | 829 | 823 |
| 270 | hPGT121.66 AAS + W/huSP34.27.8 scFv AAS + SAV + R | 853 | 829 | 823 |
| 271 | hPGT121.66 AAS + W/huSP34.28.8scFv AAS + SAV + R | 854 | 829 | 823 |
| 272 | hPGT121.66 AAS + W/huSP34.33.8 scFv AAS + SAV + R | 855 | 829 | 823 |
| 273 | hPGT121.66 AAS + W/huSP34.34.10 scFv AAS + SAV + R | 856 | 829 | 823 |
| 274 | hPGT121.66 AAS + W/huSP34.34.11 scFv AAS + SAV + R | 857 | 829 | 823 |
| 275 | hPGT121.66 AAS + W/huSP34.34.12scFv AAS + SAV + R | 858 | 829 | 823 |
| 276 | hPGT121.66 AAS + W/huSP34.40.13 scFv AAS + SAV + R | 859 | 829 | 823 |
| 277 | hPGT121.66 AAS + W/huSP34.41.13 scFv AAS + SAV + R | 860 | 829 | 823 |
| 278 | 10-1074 AAS + SAV + YTE/huSP34.3.13scFv AAS + W + YTE | 861 | 862 | 863 |
| 279 | 10-1074 AAS + SAV + R/huSP34.3.13scFv AAS + W + YTE | 861 | 864 | 863 |
| 280 | 10-1074 AAS + SAV + R/huSP34.3.13scFv AAS + W | 865 | 864 | 863 |
| 281 | 10-1074 AAS + SAV/huSP34.3.13scFv AAS + W | 865 | 866 | 863 |
| 282 | 10-1074 AAS + W/huSP34.3.13scFv AAS + SAV + R | 867 | 868 | 863 |
| 283 | 10-1074 AAS + SAV + YTE/huSP34.39.13scFv AAS + W + YTE | 869 | 862 | 863 |
| 284 | 10-1074 AAS + SAV + R/huSP34.39.13scFv AAS + W + YTE | 869 | 864 | 863 |
| 285 | 10-1074 AAS + SAV + R/huSP34.39.13scFv AAS + W | 870 | 864 | 863 |
| 286 | 10-1074 AAS + SAV/huSP34.39.13scFv AAS + W | 870 | 866 | 863 |
| 287 | 10-1074 AAS + W + YTE/huSP34.39.13scFv AAS + SAV + R | 871 | 872 | 863 |
| 288 | 10-1074 AAS + W/huSP34.39.13scFv AAS + SAV + R | 871 | 868 | 863 |
| 289 | 10-1074 AAS + SAV + YTE/huSP34.1.3scFv AAS + W + YTE | 873 | 862 | 863 |
| 290 | 10-1074 AAS + SAV/huSP34.1.3scFv AAS + W | 874 | 866 | 863 |
| 291 | 10-1074 AAS + W + YTE/huSP34.1.3 scFv AAS + SAV + R | 875 | 872 | 863 |
| 292 | 10-1074 AAS + W/huSP34.1.3scFv AAS + SAV + R | 875 | 868 | 863 |
| 293 | 10-1074 AAS + W + LS/huSP34.1.3 scFv AAS + SAV + R | 875 | 876 | 863 |
| 294 | 10-1074 AAS + SAV + YTE/huSP34.3.8scFv AAS + W + YTE | 877 | 862 | 863 |
| 295 | 10-1074 AAS + SAV/huSP34.3.8scFv AAS + W | 878 | 866 | 863 |
| 296 | 10-1074 AAS + SAV + YTE/huSP34.34.3scFv AAS + W + YTE | 879 | 862 | 863 |
| 297 | 10-1074 AAS + SAV/huSP34.34.3scFv AAS + W | 880 | 866 | 863 |
| 298 | PGT-134 AAS + SAV + YTE/huSP34.3.13scFv AAS + W + YTE | 881 | 882 | 883 |
| 299 | PGT-134 AAS + SAV + R/huSP34.3.13scFv AAS + W + YTE | 881 | 884 | 883 |
| 300 | PGT-134 AAS + SAV + R/huSP34.3.13scFv AAS + W | 885 | 884 | 883 |
| 301 | PGT-134 AAS + SAV/huSP34.3.13scFv AAS + W | 885 | 886 | 883 |
| 302 | PGT-134 AAS + W/huSP34.3.13scFv AAS + SAV + R | 887 | 888 | 883 |
| 303 | PGT-134 AAS + SAV + YTE/huSP34.39.13scFv AAS + W + YTE | 889 | 882 | 883 |
| 304 | PGT-134 AAS + SAV + R/huSP34.39.13scFv AAS + W + YTE | 889 | 884 | 883 |
| 305 | PGT-134 AAS + SAV + R/huSP34.39.13scFv AAS + W | 890 | 884 | 883 |
| 306 | PGT-134 AAS + SAV/huSP34.39.13scFv AAS + W | 890 | 886 | 883 |
| 307 | PGT-134 AAS + W + YTE/huSP34.39.13scFv AAS + SAV + R | 891 | 892 | 883 |
| 308 | PGT-134 AAS + W/huSP34.39.13scFv AAS + SAV + R | 891 | 888 | 883 |
| 309 | PGT-134 AAS + SAV + YTE/huSP34.1.3scFv AAS + W + YTE | 893 | 882 | 883 |
| 310 | PGT-134 AAS + SAV/huSP34.1.3scFv AAS + W | 894 | 886 | 883 |
| 311 | PGT-134 AAS + W + YTE/huSP34.1.3 scFv AAS + SAV + R | 895 | 892 | 883 |
| 312 | PGT-134 AAS + W/huSP34.1.3scFv AAS + SAV + R | 895 | 888 | 883 |
| 313 | PGT-134 AAS + W + LS/huSP34.1.3 scFv AAS + SAV + R | 895 | 896 | 883 |
| 314 | PGT-134 AAS + SAV + YTE/huSP34.3.8scFv AAS + W + YTE | 897 | 882 | 883 |
| 315 | PGT-134 AAS + SAV/huSP34.3.8scFv AAS + W | 898 | 886 | 883 |
| 316 | PGT-134 AAS + SAV + YTE/huSP34.34.3scFv AAS + W + YTE | 899 | 882 | 883 |
| 317 | PGT-134 AAS + SAV/huSP34.34.3scFv AAS + W | 900 | 886 | 883 |

[0522] It is understood that the examples and embodiments described herein are for illustrative purposes only and that various modifications or changes in light thereof will be suggested to persons skilled in the art and are to be included within the spirit and purview of this application and scope of the appended claims. All publications, patents, and patent applications cited herein are hereby incorporated by reference in their entirety for all purposes.

1-150. (canceled)

151. A polynucleotide or multiple polynucleotides encoding a multi-specific antigen binding molecule that binds to human CD3 and an HIV antigen, wherein the antigen binding molecule comprises:
(a) a first antigen binding domain that comprises a first heavy chain variable domain (VH) and a first light chain variable domain (VL), wherein the first antigen binding domain binds to CD3 and comprises a first VH-complementarity determining region (CDR) 1, a first VH-CDR2, a first VH-CDR3, a first VL-CDR1, a first VL-CDR2 and a first VL-CDR3 comprising the following amino acid sequences, respectively:
(i) SEQ ID NOs: 1, 11, 8, 4, 9 and 10; or
(ii) SEQ ID NOs: 1, 12, 8, 4, 9 and 10, wherein the first VH and the first VL comprise the amino acid sequences of SEQ ID NOs: 51 and 56, respectively, or comprise amino acid sequences that are at least 95%, at least 96%, at least 97%, at least 98%, or at least 99% identical to the amino acid sequences set forth, respectively: SEQ ID NOs: 51 and 56; and
(b) the second antigen binding domain comprises one or more extracellular (EC) domains of CD4.

152-153. (canceled)

154. The polynucleotide or polynucleotides of claim 151, wherein the one or more EC domains of CD4 comprise an amino acid sequence as set forth below, or an amino acid sequence that is at least 93%, at least 94%, at least 95%, at least 96%, at least 97%, at least 98%, or at least 99% identical to a sequence selected from the group consisting of:
(i)
(SEQ ID NO: 746)
KKVVYGKKGDTVELTCTASQKKNIQFHWKNSNQIKILGNQGSFLTKGPSK
LNDRVDSRRSLWDQGNFPLIIKNLKPEDSDTYICEVEDQKEEVQLVVVG;
(ii)
(SEQ ID NO: 747)
KKVVYGKKGDTVELTCTASQKKNIQFHWKNSNQIKILGNQGSFLTKGPSK
LNDRVDSRRSLWDQGNFPLIIKNLKPEDSDTYICEVEDQKEEVQLVVVGG
GGSGKKVVYGKKGDTVELTCTASQKKNIQFHWKNSNQIKILGNQGSFLTK
GPSKLNDRVDSRRSLWDQGNFPLIIKNLKPEDSDTYICEVEDQKEEVQLV
VVG;
(iii)
(SEQ ID NO: 748)
KKVVLGKKGDTVELTCTASQKKSIQFHWKNSNQIKILGNQGSFLTKGPSK
LNDRADSRRSLWDQGNFPLIIKNLKIEDSDTYICEVEDQKEEVQLLVFG;
or
(iv)
(SEQ ID NO: 749)
KKVVLGKKGDTVELTCTASQKKSIQFHWKNSNQIKILGNQGSFLTKGPSK
LNDRADSRRSLWDQGNFPLIIKNLKIEDSDTYICEVEDQKEEVQLLVFGG
GGSGKKVVLGKKGDTVELTCTASQKKSIQFHWKNSNQIKILGNQGSFLTK
GPSKLNDRADSRRSLWDQGNFPLIIKNLKIEDSDTYICEVEDQKEEVQLL
VFG.

155. The polynucleotide or polynucleotides of claim 151, comprising the following polynucleotide sequences, or polynucleotide sequences that are at least 85%, at least 90%, at least 91%, at least 92%, at least 93%, at least 94%, at least 95%, at least 96%, at least 97%, at least 98%, or at least 99% identical to the polynucleotide sequences set forth, respectively, below:
i. SEQ ID NOs: 995, 996 and 997;
ii. SEQ ID NOs: 998, 999 and 1000;
iii. SEQ ID NOs: 1001, 1002 and 1003;
iv. SEQ ID NOs: 1004, 1005 and 1000;
v. SEQ ID NOs: 1006, 1002 and 997;
vi. SEQ ID NOs: 1007, 1093 and 1000;
vii. SEQ ID NOs: 998, 1008 and 1000; or
viii. SEQ ID NOs: 998, 1009 and 1000.

156. The polynucleotide or polynucleotides of claim 151, comprising the following polynucleotide sequences, or polynucleotide sequences that are at least 85%, at least 90%, at least 91%, at least 92%, at least 93%, at least 94%, at least 95%, at least 96%, at least 97%, at least 98%, or at least 99% identical to the polynucleotide sequences set forth, respectively: SEQ ID NOs: 995, 996 and 997.

157-158. (canceled)

159. The polynucleotide or polynucleotides of claim 156, comprising the following polynucleotide sequences, respectively: SEQ ID NOs: 995, 996 and 997.

160-163. (canceled)

164. The polynucleotide or polynucleotides of claim 151, wherein the polynucleotide or polynucleotides are comprised of DNA or RNA.

165. The polynucleotide or polynucleotides of claim 151, wherein the polynucleotide or polynucleotides are comprised of mRNA.

166. The polynucleotide or polynucleotides of claim 151, comprising codon bias for efficient expression in a human cell.

167. A lipid nanoparticle (LNP), comprising the polynucleotide or polynucleotides of claim 151.

168. An expression cassette or multiple expression cassettes comprising one or more regulatory sequences operably linked to the polynucleotide or polynucleotides of claim 151.

169. An expression vector or multiple expression vectors comprising the expression cassette or expression cassettes of claim 168.

170. The expression vector or expression vectors of claim 169, wherein the expression vector or expression vectors comprise a plasmid vector or a viral vector.

171-173. (canceled)

174. The expression vector of any one of claim 170, wherein the expression vector comprises:
(i) a first expression cassette comprising a first polynucleotide encoding an anti-CD3 VL-CL fusion protein;
(ii) a second expression cassette comprising a second polynucleotide encoding an anti-CD3 VH-Fc fusion protein; and
(iii) a third expression cassette comprising a third polynucleotide encoding a CD4 extracellular (EC) domain-Fc fusion protein.

175. The expression vector of claim 170, wherein the expression vector comprises in sequential order from 5′ to 3′:
(i) a first expression cassette comprising a first polynucleotide encoding an anti-CD3 VL-CL fusion protein;
(ii) a second expression cassette comprising a second polynucleotide encoding an anti-CD3 VH-Fc fusion protein; and
(iii) a third expression cassette comprising a third polynucleotide encoding a CD4 EC domain-Fc fusion protein.

176. The expression vector of claim 174, wherein the anti-CD3 VL-CL fusion protein, the anti-CD3 VH-Fc fusion protein and the CD4 EC domain-Fc fusion protein comprise amino acid sequences set forth, respectively, below, or comprise amino acid sequences that are at least 90%, at least 91%, at least 92%, at least 93%, at least 94%, at least 95%, at least 96%, at least 97%, at least 98%, or at least 99% identical to the amino acid sequences set forth, respectively, below:
1) SEQ ID NOs: 753, 752 and 751;
2) SEQ ID NOs: 753, 752 and 754;
3) SEQ ID NOs: 753, 756 and 755;
4) SEQ ID NOs: 753, 757 and 755;
5) SEQ ID NOs: 753, 757 and 758;
6) SEQ ID NOs: 753, 756 and 759;
7) SEQ ID NOs: 761, 760 and 754;
8) SEQ ID NOs: 761, 760 and 762;
9) SEQ ID NOs: 753, 763 and 751;
10) SEQ ID NOs: 753, 752 and 764;
11) SEQ ID NOs: 753, 752 and 765;
12) SEQ ID NOs: 753, 767 and 766;
13) SEQ ID NOs: 753, 768 and 766;
14) SEQ ID NOs: 753, 768 and 769;
15) SEQ ID NOs: 753, 767 and 770;
16) SEQ ID NOs: 761, 771 and 765;
17) SEQ ID NOs: 761, 771 and 772;
18) SEQ ID NOs: 776, 775 and 774;
19) SEQ ID NOs: 776, 778 and 777;
20) SEQ ID NOs: 776, 778 and 779;
21) SEQ ID NOs: 776, 780 and 779;
22) SEQ ID NOs: 776, 781 and 777;
23) SEQ ID NOs: 753, 752 and 782;
24) SEQ ID NOs: 753, 752 and 783;
25) SEQ ID NOs: 753, 785 and 784;
26) SEQ ID NOs: 753, 786 and 784;
27) SEQ ID NOs: 753, 786 and 787;
28) SEQ ID NOs: 753, 785 and 788;
29) SEQ ID NOs: 761, 789 and 783;
30) SEQ ID NOs: 761, 789 and 790;
31) SEQ ID NOs: 794, 793 and 792;
32) SEQ ID NOs: 794, 796 and 795;
33) SEQ ID NOs: 794, 796 and 797;
34) SEQ ID NOs: 794, 798 and 797; or
35) SEQ ID NOs: 794, 799 and 795.

177. The expression vector of claim 176, wherein the anti-CD3 VL-CL fusion protein, the anti-CD3 VH-Fc fusion protein and the CD4 EC domain-Fc fusion protein comprise amino acid sequences set forth, respectively, or comprise amino acid sequences that are at least 90%, at least 91%, at least 92%, at least 93%, at least 94%, at least 95%, at least 96%, at least 97%, at least 98%, or at least 99% identical to the amino acid sequences set forth, respectively: SEQ ID NOs: 753, 752 and 751.

178-179. (canceled)

180. The expression vector of claim 177, wherein the anti-CD3 VL-CL fusion protein, the anti-CD3 VH-Fc fusion protein and the CD4 EC domain-Fc fusion protein comprise amino acid sequences set forth, respectively: SEQ ID NOs: 753, 752 and 751.

181-182. (canceled)

183. A cell or population of cells, comprising the polynucleotide or polynucleotides of the expression cassette or multiple expression cassettes of claim 168.

184-185. (canceled)

186. The cell or population of cells of claim 183, wherein the mammalian cell is a Chinese Hamster Ovary (CHO) cell.

187-191. (canceled)

192. A pharmaceutical composition comprising one or more polynucleotides of claim 151, and a pharmaceutically acceptable carrier.

193. The pharmaceutical composition of claim 192, wherein the composition comprises an aqueous formulation.

194-222. (canceled)

223. The pharmaceutical composition of claim 192, formulated for intravenous, intramuscular or subcutaneous administration.

224. A kit comprising one or more containers comprising one or more of the polynucleotide or polynucleotides of claim 151.

225-349. (canceled)

350. The polynucleotide or polynucleotides of claim 151, wherein the EC domain of CD4 comprises an amino acid sequence of SEQ ID NO: 746 or an amino acid sequence that is at least 93%, at least 94%, at least 95%, at least 96%, at least 97%, at least 98%, or at least 99% identical to a sequence of SEQ ID NO: 746.

351. The polynucleotide or polynucleotides of claim 151, wherein the first antigen binding domain comprises a first VH-CDR1, a first VH-CDR2, a first VH-CDR3, a first VL-CDR1, a first VL-CDR2 and a first VL-CDR3 comprising the following amino acid sequences, respectively: SEQ ID NOs: 1, 11, 8, 4, 9 and 10; or SEQ ID NOs: 1, 12, 8, 4, 9 and 10; and the second antigen binding domain comprises one or more EC domains of CD4 comprising an amino acid sequence that comprises or is at least 93%, at least 94%, at least 95%, at least 96%, at least 97%, at least 98%, or at least 99%, identical to the EC domains of CD4 selected from the group consisting of SEQ ID NOs: 746-749.

352. The polynucleotide or polynucleotides of claim 151, wherein the first antigen binding domain comprises a first VH-CDR1, a first VH-CDR2, a first VH-CDR3, a first VL-CDR1, a first VL-CDR2 and a first VL-CDR3 comprising the following amino acid sequences, respectively: SEQ ID NOs: 1, 12, 8, 4, 9 and 10; and the second antigen binding domain comprises the EC domain of CD4 comprising an amino acid sequence of SEQ ID NO:746 or an amino acid sequence that is at least 93%, at least 94%, at least 95%, at least 96%, at least 97%, at least 98%, or at least 99%, identical to the EC domain of CD4 of SEQ ID NO: 746.

353. The polynucleotide or polynucleotides of claim 151, wherein the first antigen binding domain comprises a first VH and a first VL comprising the amino acid sequences set forth, respectively, or comprising amino acid sequences that are at least 95%, at least 96%, at least 97%, at least 98%, or at least 99% identical to the amino acid sequences set forth, respectively: SEQ ID NOs: 51 and 56; and the second antigen binding domain comprises the EC domain of CD4 comprising an amino acid sequence of SEQ ID NO:746 or an amino acid sequence that is at least 93%, at least 94%, at least 95%, at least 96%, at least 97%, at least 98%, or at least 99%, identical to the EC domain of CD4 of SEQ ID NO: 746.

The application's sequence listing, which the Patent Office published only in electronic form, follows.

SEQUENCE LISTING (1093 sequences)

SEQ ID NO: 1 - protein, 5 aa, synthetic construct
  REGION 1..5: note = Description of Artificial Sequence: Synthetic peptide
TYAMN

SEQ ID NO: 2 - protein, 19 aa, synthetic construct
  REGION 1..19: note = Description of Artificial Sequence: Synthetic peptide
  VARIANT 15: note = A or D
  VARIANT 19: note = G or S
RIRSKYNNYATYYAXSVKX

SEQ ID NO: 3 - protein, 14 aa, synthetic construct
  REGION 1..14: note = Description of Artificial Sequence: Synthetic peptide
  VARIANT 6: note = H or N
HGNFGXSYVSWFAY

SEQ ID NO: 4 - protein, 14 aa, synthetic construct
  REGION 1..14: note = Description of Artificial Sequence: Synthetic peptide
GSSTGAVTTGHYAN

SEQ ID NO: 5 - protein, 7 aa, synthetic construct
  REGION 1..7: note = Description of Artificial Sequence: Synthetic peptide
  VARIANT 3..4: note = This region may encompass "SN" or "NK"
GTXXRAP

SEQ ID NO: 6 - protein, 9 aa, synthetic construct
  REGION 1..9: note = Description of Artificial Sequence: Synthetic peptide
  VARIANT 7: note = L or R
ALWYSNXWV

SEQ ID NO: 7 - protein, 19 aa, synthetic construct
  REGION 1..19: note = Description of Artificial Sequence: Synthetic peptide
  VARIANT 19: note = G or S
RIRSKYNNYATYYADSVKX

SEQ ID NO: 8 - protein, 14 aa, synthetic construct
  REGION 1..14: note = Description of Artificial Sequence: Synthetic peptide
HGNFGHSYVSWFAY

SEQ ID NO: 9 - protein, 7 aa, synthetic construct
  REGION 1..7: note = Description of Artificial Sequence: Synthetic peptide
GTSNRAP

SEQ ID NO: 10 - protein, 9 aa, synthetic construct
  REGION 1..9: note = Description of Artificial Sequence: Synthetic peptide
ALWYSNRWV

SEQ ID NO: 11 - protein, 19 aa, synthetic construct
  REGION 1..19: note = Description of Artificial Sequence: Synthetic peptide
RIRSKYNNYATYYADSVKG

SEQ ID NO: 12 - protein, 19 aa, synthetic construct
  REGION 1..19: note = Description of Artificial Sequence: Synthetic peptide
RIRSKYNNYATYYADSVKS

SEQ ID NO: 13 - protein, 19 aa, synthetic construct
  REGION 1..19: note = Description of Artificial Sequence: Synthetic peptide
RIRSKYNNYATYYAASVKG

SEQ ID NO: 14 - protein, 7 aa, synthetic construct
  REGION 1..7: note = Description of Artificial Sequence: Synthetic peptide
GTNKRAP

SEQ ID NO: 15 - protein, 9 aa, synthetic construct
  REGION 1..9: note = Description of Artificial Sequence: Synthetic peptide
ALWYSNLWV

SEQ ID NO: 16 - protein, 14 aa, synthetic construct
  REGION 1..14: note = Description of Artificial Sequence: Synthetic peptide
HGNFGNSYVSWFAY

SEQ ID NO: 17 - protein, 7 aa, synthetic construct
  REGION 1..7: note = Description of Artificial Sequence: Synthetic peptide
GFTFNTY

SEQ ID NO: 18 - protein, 6 aa, synthetic construct
  REGION 1..6: note = Description of Artificial Sequence: Synthetic peptide
SKYNNY

SEQ ID NO: 19 - protein, 12 aa, synthetic construct
  REGION 1..12: note = Description of Artificial Sequence: Synthetic peptide
  VARIANT 5: note = H or N
GNFGXSYVSWFA

SEQ ID NO: 20 - protein, 11 aa, synthetic construct
  REGION 1..11: note = Description of Artificial Sequence: Synthetic peptide
SSTGAVTTGHY

SEQ ID NO: 21 - skipped

SEQ ID NO: 22 - protein, 6 aa, synthetic construct
  REGION 1..6: note = Description of Artificial Sequence: Synthetic peptide
  VARIANT 5: note = L or R
WYSNXW

SEQ ID NO: 23 - protein, 12 aa, synthetic construct
  REGION 1..12: note = Description of Artificial Sequence: Synthetic peptide
GNFGHSYVSWFA

SEQ ID NO: 24 - skipped

SEQ ID NO: 25 - protein, 6 aa, synthetic construct
  REGION 1..6: note = Description of Artificial Sequence: Synthetic peptide
WYSNRW

SEQ ID NO: 26 - skipped

SEQ ID NO: 27 - protein, 6 aa, synthetic construct
  REGION 1..6: note = Description of Artificial Sequence: Synthetic peptide
WYSNLW

SEQ ID NO: 28 - protein, 8 aa, synthetic construct
  REGION 1..8: note = Description of Artificial Sequence: Synthetic peptide
GFTFNTYA

SEQ ID NO: 29 - protein, 10 aa, synthetic construct
  REGION 1..10: note = Description of Artificial Sequence: Synthetic peptide
IRSKYNNYAT

SEQ ID NO: 30 - protein, 16 aa, synthetic construct
  REGION 1..16: note = Description of Artificial Sequence: Synthetic peptide
  VARIANT 8: note = H or N
VRHGNFGXSYVSWFAY

SEQ ID NO: 31 - protein, 9 aa, synthetic construct
  REGION 1..9: note = Description of Artificial Sequence: Synthetic peptide
TGAVTTGHY

SEQ ID NO: 32 - protein, 16 aa, synthetic construct
  REGION 1..16: note = Description of Artificial Sequence: Synthetic peptide
VRHGNFGHSYVSWFAY

SEQ ID NO: 33 - protein, 16 aa, synthetic construct
  REGION 1..16: note = Description of Artificial Sequence: Synthetic peptide
VRHGNFGNSYVSWFAY

SEQ ID NO: 34 - protein, 10 aa, synthetic construct
  REGION 1..10: note = Description of Artificial Sequence: Synthetic peptide
ASGFTFNTYA

SEQ ID NO: 35 - protein, 19 aa, synthetic construct
  REGION 1..19: note = Description of Artificial Sequence: Synthetic peptide
  VARIANT 14: note = A or D
  VARIANT 18: note = G or S
IRSKYNNYATYYAXSVKXR

SEQ ID NO: 36 - protein, 13 aa, synthetic construct
  REGION 1..13: note = Description of Artificial Sequence: Synthetic peptide
  VARIANT 6: note = H or N
HGNFGXSYVSWFA

SEQ ID NO: 37 - protein, 11 aa, synthetic construct
  REGION 1..11: note = Description of Artificial Sequence: Synthetic peptide
SSTGAVTTGHY

SEQ ID NO: 38 - protein, 12 aa, synthetic construct
  REGION 1..12: note = Description of Artificial Sequence: Synthetic peptide
  VARIANT 3: note = N or S
  VARIANT 8: note = G or W
GTXNRAPXVPAR

SEQ ID NO: 39 - protein, 19 aa, synthetic construct
  REGION 1..19: note = Description of Artificial Sequence: Synthetic peptide
  VARIANT 18: note = G or S
IRSKYNNYATYYADSVKXR

SEQ ID NO: 40 - protein, 13 aa, synthetic construct
  REGION 1..13: note = Description of Artificial Sequence: Synthetic peptide
HGNFGHSYVSWFA

SEQ ID NO: 41 - protein, 12 aa, synthetic construct
  REGION 1..12: note = Description of Artificial Sequence: Synthetic peptide
GTSNRAPGVPAR

SEQ ID NO: 42 - protein, 19 aa, synthetic construct
  REGION 1..19: note = Description of Artificial Sequence: Synthetic peptide
IRSKYNNYATYYADSVKGR

SEQ ID NO: 43 - protein, 19 aa, synthetic construct
  REGION 1..19: note = Description of Artificial Sequence: Synthetic peptide
IRSKYNNYATYYADSVKSR

SEQ ID NO: 44 - protein, 19 aa, synthetic construct
  REGION 1..19: note = Description of Artificial Sequence: Synthetic peptide
IRSKYNNYATYYAASVKGR

SEQ ID NO: 45 - protein, 12 aa, synthetic construct
  REGION 1..12: note = Description of Artificial Sequence: Synthetic peptide
GTNKRAPWTPAR

SEQ ID NO: 46 - protein, 13 aa, synthetic construct
  REGION 1..13: note = Description of Artificial Sequence: Synthetic peptide
HGNFGNSYVSWFA

SEQ ID NO: 47 - protein, 12 aa, synthetic construct
  REGION 1..12: note = Description of Artificial Sequence: Synthetic peptide
GTNKRAPGVPAR

SEQ ID NO: 48 - protein, 125 aa, synthetic construct
  REGION 1..125: note = Description of Artificial Sequence: Synthetic polypeptide
  VARIANT 64: note = A or D
  VARIANT 68: note = G or S
  VARIANT 84: note = E or Q
  VARIANT 89: note = K or R
  VARIANT 95: note = M or V
  VARIANT 106: note = H or N
EVQLVESGGGLVQPGGSLRLSCAASGFTFNTYAMNWVRQAPGKGLEWVGRIRSKYNNYATYYAXSVKXRFTISRDDSKNSLYLXMNSLXTEDTAXYYCVRHGNFGXSYVSWFAYWGQGTLVTVSS

SEQ ID NO: 49 - protein, 125 aa, synthetic construct
  REGION 1..125: note = Description of Artificial Sequence: Synthetic polypeptide
  VARIANT 68: note = G or S
  VARIANT 84: note = E or Q
EVQLVESGGGLVQPGGSLRLSCAASGFTFNTYAMNWVRQAPGKGLEWVGRIRSKYNNYATYYADSVKXRFTISRDDSKNSLYLXMNSLRTEDTAVYYCVRHGNFGHSYVSWFAYWGQGTLVTVSS

SEQ ID NO: 50 - protein, 125 aa, synthetic construct
  REGION 1..125: note = Description of Artificial Sequence: Synthetic polypeptide
EVQLVESGGGLVQPGGSLRLSCAASGFTFNTYAMNWVRQAPGKGLEWVGRIRSKYNNYATYYADSVKGRFTISRDDSKNSLYLQMNSLRTEDTAVYYCVRHGNFGHSYVSWFAYWGQGTLVTVSS

SEQ ID NO: 51 - protein, 125 aa, synthetic construct
  REGION 1..125: note = Description of Artificial Sequence: Synthetic polypeptide
EVQLVESGGGLVQPGGSLRLSCAASGFTFNTYAMNWVRQAPGKGLEWVGRIRSKYNNYATYYADSVKSRFTISRDDSKNSLYLEMNSLRTEDTAVYYCVRHGNFGHSYVSWFAYWGQGTLVTVSS

SEQ ID NO: 52 - protein, 125 aa, synthetic construct
  REGION 1..125: note = Description of Artificial Sequence: Synthetic polypeptide
EVQLVESGGGLVQPGGSLRLSCAASGFTFNTYAMNWVRQAPGKGLEWVGRIRSKYNNYATYYAASVKGRFTISRDDSKNSLYLQMNSLKTEDTAMYYCVRHGNFGHSYVSWFAYWGQGTLVTVSS

SEQ ID NO: 53 - protein, 125 aa, synthetic construct
  REGION 1..125: note = Description of Artificial Sequence: Synthetic polypeptide
EVQLVESGGGLVQPGGSLRLSCAASGFTFNTYAMNWVRQAPGKGLEWVGRIRSKYNNYATYYAASVKGRFTISRDDSKNSLYLQMNSLKTEDTAMYYCVRHGNFGNSYVSWFAYWGQGTLVTVSS

SEQ ID NO: 54 - protein, 109 aa, synthetic construct
  REGION 1..109: note = Description of Artificial Sequence: Synthetic polypeptide
  VARIANT 54..55: note = This region may encompass "SN" or "NK"
  VARIANT 59: note = G or W
  VARIANT 77: note = I or L
  VARIANT 97: note = L or R
QAVVTQEPSLTVSPGGTVTLTCGSSTGAVTTGHYANWVQQKPGQAPRGLIGGTXXRAPXVPARFSGSLLGGKAALTXSGAQPEDEAEYYCALWYSNXWVFGGGTKLTVL

SEQ ID NO: 55 - protein, 109 aa, synthetic construct
  REGION 1..109: note = Description of Artificial Sequence: Synthetic polypeptide
  VARIANT 54..55: note = This region may encompass "SN" or "NK"
QAVVTQEPSLTVSPGGTVTLTCGSSTGAVTTGHYANWVQQKPGQAPRGLIGGTXXRAPGVPARFSGSLLGGKAALTISGAQPEDEAEYYCALWYSNRWVFGGGTKLTVL

SEQ ID NO: 56 - protein, 109 aa, synthetic construct
  REGION 1..109: note = Description of Artificial Sequence: Synthetic polypeptide
QAVVTQEPSLTVSPGGTVTLTCGSSTGAVTTGHYANWVQQKPGQAPRGLIGGTSNRAPGVPARFSGSLLGGKAALTISGAQPEDEAEYYCALWYSNRWVFGGGTKLTVL

SEQ ID NO: 57 - protein, 109 aa, synthetic construct
  REGION 1..109: note = Description of Artificial Sequence: Synthetic polypeptide
QAVVTQEPSLTVSPGGTVTLTCGSSTGAVTTGHYANWVQQKPGQAPRGLIGGTNKRAPWTPARFSGSLLGGKAALTLSGAQPEDEAEYYCALWYSNLWVFGGGTKLTVL

SEQ ID NO: 58 - protein, 109 aa, synthetic construct
  REGION 1..109: note = Description of Artificial Sequence: Synthetic polypeptide
QAVVTQEPSLTVSPGGTVTLTCGSSTGAVTTGHYANWVQQKPGQAPRGLIGGTNKRAPGVPARFSGSLLGGKAALTISGAQPEDEAEYYCALWYSNRWVFGGGTKLTVL

SEQ ID NO: 59 - protein, 254 aa, synthetic construct
  REGION 1..254: note = Description of Artificial Sequence: Synthetic polypeptide
  VARIANT 64: note = A or D
  VARIANT 68: note = G or S
  VARIANT 84: note = E or Q
  VARIANT 89: note = K or R
  VARIANT 95: note = M or V
  VARIANT 106: note = H or N
  VARIANT 199..200: note = This region may encompass "SN" or "NK"
  VARIANT 204: note = G or W
  VARIANT 222: note = I or L
  VARIANT 242: note = L or R
EVQLVESGGGLVQPGGSLRLSCAASGFTFNTYAMNWVRQAPGKGLEWVGRIRSKYNNYATYYAXSVKXRFTISRDDSKNSLYLXMNSLXTEDTAXYYCVRHGNFGXSYVSWFAYWGQGTLVTVSSGGGGSGGGGSGGGGSGGGGSQAVVTQEPSLTVSPGGTVTLTCGSSTGAVTTGHYANWVQQKPGQAPRGLIGGTXXRAPXVPARFSGSLLGGKAALTXSGAQPEDEAEYYCALWYSNXWVFGGGTKLTVL

SEQ ID NO: 60 - protein, 254 aa, synthetic construct
  REGION 1..254: note = Description of Artificial Sequence: Synthetic polypeptide
  VARIANT 68: note = G or S
  VARIANT 84: note = E or Q
  VARIANT 199..200: note = This region may encompass "SN" or "NK"
EVQLVESGGGLVQPGGSLRLSCAASGFTFNTYAMNWVRQAPGKGLEWVGRIRSKYNNYATYYADSVKXRFTISRDDSKNSLYLXMNSLRTEDTAVYYCVRHGNFGHSYVSWFAYWGQGTLVTVSSGGGGSGGGGSGGGGSGGGGSQAVVTQEPSLTVSPGGTVTLTCGSSTGAVTTGHYANWVQQKPGQAPRGLIGGTXXRAPGVPARFSGSLLGGKAALTISGAQPEDEAEYYCALWYSNRWVFGGGTKLTVL

SEQ ID NO: 61 - protein, 254 aa, synthetic construct
  REGION 1..254: note = Description of Artificial Sequence: Synthetic polypeptide
  VARIANT 68: note = G or S
  VARIANT 84: note = E or Q
EVQLVESGGGLVQPGGSLRLSCAASGFTFNTYAMNWVRQAPGKGLEWVGRIRSKYNNYATYYADSVKXRFTISRDDSKNSLYLXMNSLRTEDTAVYYCVRHGNFGHSYVSWFAYWGQGTLVTVSSGGGGSGGGGSGGGGSGGGGSQAVVTQEPSLTVSPGGTVTLTCGSSTGAVTTGHYANWVQQKPGQAPRGLIGGTSNRAPGVPARFSGSLLGGKAALTISGAQPEDEAEYYCALWYSNRWVFGGGTKLTVL

SEQ ID NO: 62 - protein, 254 aa, synthetic construct
  REGION 1..254: note = Description of Artificial Sequence: Synthetic polypeptide
EVQLVESGGGLVQPGGSLRLSCAASGFTFNTYAMNWVRQAPGKGLEWVGRIRSKYNNYATYYADSVKGRFTISRDDSKNSLYLQMNSLRTEDTAVYYCVRHGNFGHSYVSWFAYWGQGTLVTVSSGGGGSGGGGSGGGGSGGGGSQAVVTQEPSLTVSPGGTVTLTCGSSTGAVTTGHYANWVQQKPGQAPRGLIGGTSNRAPGVPARFSGSLLGGKAALTISGAQPEDEAEYYCALWYSNRWVFGGGTKLTVL

SEQ ID NO: 63 - protein, 254 aa, synthetic construct
  REGION 1..254: note = Description of Artificial Sequence: Synthetic polypeptide
EVQLVESGGGLVQPGGSLRLSCAASGFTFNTYAMNWVRQAPGKGLEWVGRIRSKYNNYATYYADSVKSRFTISRDDSKNSLYLEMNSLRTEDTAVYYCVRHGNFGHSYVSWFAYWGQGTLVTVSSGGGGSGGGGSGGGGSGGGGSQAVVTQEPSLTVSPGGTVTLTCGSSTGAVTTGHYANWVQQKPGQAPRGLIGGTSNRAPGVPARFSGSLLGGKAALTISGAQPEDEAEYYCALWYSNRWVFGGGTKLTVL

SEQ ID NO: 64 - protein, 254 aa, synthetic construct
  REGION 1..254: note = Description of Artificial Sequence: Synthetic polypeptide
EVQLVESGGGLVQPGGSLRLSCAASGFTFNTYAMNWVRQAPGKGLEWVGRIRSKYNNYATYYAASVKGRFTISRDDSKNSLYLQMNSLKTEDTAMYYCVRHGNFGHSYVSWFAYWGQGTLVTVSSGGGGSGGGGSGGGGSGGGGSQAVVTQEPSLTVSPGGTVTLTCGSSTGAVTTGHYANWVQQKPGQAPRGLIGGTNKRAPWTPARFSGSLLGGKAALTLSGAQPEDEAEYYCALWYSNLWVFGGGTKLTVL

SEQ ID NO: 65 - protein, 254 aa, synthetic construct
  REGION 1..254: note = Description of Artificial Sequence: Synthetic polypeptide
EVQLVESGGGLVQPGGSLRLSCAASGFTFNTYAMNWVRQAPGKGLEWVGRIRSKYNNYATYYAASVKGRFTISRDDSKNSLYLQMNSLKTEDTAMYYCVRHGNFGNSYVSWFAYWGQGTLVTVSSGGGGSGGGGSGGGGSGGGGSQAVVTQEPSLTVSPGGTVTLTCGSSTGAVTTGHYANWVQQKPGQAPRGLIGGTNKRAPWTPARFSGSLLGGKAALTLSGAQPEDEAEYYCALWYSNLWVFGGGTKLTVL

SEQ ID NO: 66 - protein, 254 aa, synthetic construct
  REGION 1..254: note = Description of Artificial Sequence: Synthetic polypeptide
EVQLVESGGGLVQPGGSLRLSCAASGFTFNTYAMNWVRQAPGKGLEWVGRIRSKYNNYATYYADSVKGRFTISRDDSKNSLYLQMNSLRTEDTAVYYCVRHGNFGHSYVSWFAYWGQGTLVTVSSGGGGSGGGGSGGGGSGGGGSQAVVTQEPSLTVSPGGTVTLTCGSSTGAVTTGHYANWVQQKPGQAPRGLIGGTNKRAPGVPARFSGSLLGGKAALTISGAQPEDEAEYYCALWYSNRWVFGGGTKLTVL

SEQ ID NO: 67 - protein, 849 aa, Human immunodeficiency virus 1
MKVMGTKKNYQHLWRWGIMLLGMLMMSSAAEQLWVTVYYGVPVWREANTTLFCASDAKAYDTEVHNVWATHACVPTDPNPQEVVMGNVTEDFNMWKNNMVEQMHEDIISLWDQSLKPCVKLTPLCVTLHCTNVTISSTNGSTANVTMREEMKNCSFNTTTVIRDKIQKEYALFYKLDIVPIEGKNTNTSYRLINCNTSVITQACPKVSFEPIPIHYCAPAGFAILKCNNKTFNGKGPCRNVSTVQCTHGIKPVVSTQLLLNGSLAEEDIIIRSENFTNNGKNIIVQLKEPVKINCTRPGNNTRRSINIGPGRAFYATGAIIGDIRKAHCNISTEQWNNTLTQIVDKLREQFGNKTIIFNQSSGGDPEVVMHTFNCGGEFFYCNSTQLFNSTWFNNGTSTWNSTADNITLPCRIKQVINMWQEVGKAMYAPPIRGQIDCSSNITGLILTRDGGSNSSQNETFRPGGGNMKDNWRSELYKYKVVKIEPLGIAPTRAKRRVVQREKRAVTLGAVFLGFLGAAGSTMGAASLTLTVQARLLLSGIVQQQSNLLRAIEAQQHMLQLTVWGIKQLQARVLAIERYLKDQQLLGIWGCSGKLICTTTVPWNTSWSNKSYDYIWNNMTWMQWEREIDNYTGFIYTLIEESQNQQEKNELELLELDKWASLWNWFNITNWLWYIKLFIMIIGGLVGLRIVCAVLSIVNRVRQGYSPLSFQTRLPNPRGPDRPEETEGEGGERDRDRSARLVNGFLAIIWDDLRSLCLFSYHRLRDLLLIVARVVEILGRRGWEILKYWWNLLKYWSQELKNSAVSLLNVTAIAVAEGTDRVIEIVQRAVRAILHIPTRIRQGFERALL

SEQ ID NO: 68 - protein, 856 aa, Human immunodeficiency virus 1
MRVKEKYQHLWRWGWRWGTMLLGMLMICSATEKLWVTVYYGVPVWKEATTTLFCASDAKAYDTEVHNVWATHACVPTDPNPQEVVLVNVTENFNMWKNDMVEQMHEDIISLWDQSLKPCVKLTPLCVSLKCTDLKNDTNTNSSSGRMIMEKGEIKNCSFNISTSIRGKVQKEYAFFYKLDIIPIDNDTTSYKLTSCNTSVITQACPKVSFEPIPIHYCAPAGFAILKCNNKTFNGTGPCTNVSTVQCTHGIRPVVSTQLLLNGSLAEEEVVIRSVNFTDNAKTIIVQLNTSVEINCTRPNNNTRKRIRIQRGPGRAFVTIGKIGNMRQAHCNISRAKWNNTLKQIASKLREQFGNNKTIIFKQSSGGDPEIVTHSFNCGGEFFYCNSTQLFNSTWFNSTWSTEGSNNTEGSDTITLPCRIKQIINMWQKVGKAMYAPPISGQIRCSSNITGLLLTRDGGNSNNESEIFRPGGGDMRDNWRSELYKYKVVKIEPLGVAPTKAKRRVVQREKRAVGIGALFLGFLGAAGSTMGAASMTLTVQARQLLSGIVQQQNNLLRAIEAQQHLLQLTVWGIKQLQARILAVERYLKDQQLLGIWGCSGKLICTTAVPWNASWSNKSLEQIWNHTTWMEWDREINNYTSLIHSLIEESQNQQEKNEQELLELDKWASLWNWFNITNWLWYIKLFIMIVGGLVGLRIVFAVLSIVNRVRQGYSPLSFQTHLPTPRGPDRPEGIEEEGGERDRDRSIRLVNGSLALIWDDLRSLCLFSYHRLRDLLLIVTRIVELLGRRGWEALKYWWNLLQYWSQELKNSAVSLLNATAIAVAEGTDRVIEVVQGACRAIRHIPRRIRQGLERILL

SEQ ID NO: 69 - protein, 511 aa, Human immunodeficiency virus 1
MRVKEKYQHLWRWGWRWGTMLLGMLMICSATEKLWVTVYYGVPVWKEATTTLFCASDAKAYDTEVHNVWATHACVPTDPNPQEVVLVNVTENFNMWKNDMVEQMHEDIISLWDQSLKPCVKLTPLCVSLKCTDLKNDTNTNSSSGRMIMEKGEIKNCSFNISTSIRGKVQKEYAFFYKLDIIPIDNDTTSYKLTSCNTSVITQACPKVSFEPIPIHYCAPAGFAILKCNNKTFNGTGPCTNVSTVQCTHGIRPVVSTQLLLNGSLAEEEVVIRSVNFTDNAKTIIVQLNTSVEINCTRPNNNTRKRIRIQRGPGRAFVTIGKIGNMRQAHCNISRAKWNNTLKQIASKLREQFGNNKTIIFKQSSGGDPEIVTHSFNCGGEFFYCNSTQLFNSTWFNSTWSTEGSNNTEGSDTITLPCRIKQIINMWQKVGKAMYAPPISGQIRCSSNITGLLLTRDGGNSNNESEIFRPGGGDMRDNWRSELYKYKVVKIEPLGVAPTKAKRRVVQREKR

SEQ ID NO: 70 - protein, 475 aa, Human immunodeficiency virus 1
AEQLWVTVYYGVPVWREANTTLFCASDAKAYDTEVHNVWATHACVPTDPNPQEVVMGNVTEDFNMWKNNMVEQMHEDIISLWDQSLKPCVKLTPLCVTLHCTNVTISSTNGSTANVTMREEMKNCSFNTTTVIRDKIQKEYALFYKLDIVPIEGKNTNTSYRLINCNTSVITQACPKVSFEPIPIHYCAPAGFAILKCNNKTFNGKGPCRNVSTVQCTHGIKPVVSTQLLLNGSLAEEDIIIRSENFTNNGKNIIVQLKEPVKINCTRPGNNTRRSINIGPGRAFYATGAIIGDIRKAHCNISTEQWNNTLTQIVDKLREQFGNKTIIFNQSSGGDPEVVMHTFNCGGEFFYCNSTQLFNSTWFNNGTSTWNSTADNITLPCRIKQVINMWQEVGKAMYAPPIRGQIDCSSNITGLILTRDGGSNSSQNETFRPGGGNMKDNWRSELYKYKVVKIEPLGIAPTRAKRRVVQREKR

SEQ ID NO: 71 - protein, 481 aa, Human immunodeficiency virus 1
TEKLWVTVYYGVPVWKEATTTLFCASDAKAYDTEVHNVWATHACVPTDPNPQEVVLVNVTENFNMWKNDMVEQMHEDIISLWDQSLKPCVKLTPLCVSLKCTDLKNDTNTNSSSGRMIMEKGEIKNCSFNISTSIRGKVQKEYAFFYKLDIIPIDNDTTSYKLTSCNTSVITQACPKVSFEPIPIHYCAPAGFAILKCNNKTFNGTGPCTNVSTVQCTHGIRPVVSTQLLLNGSLAEEEVVIRSVNFTDNAKTIIVQLNTSVEINCTRPNNNTRKRIRIQRGPGRAFVTIGKIGNMRQAHCNISRAKWNNTLKQIASKLREQFGNNKTIIFKQSSGGDPEIVTHSFNCGGEFFYCNSTQLFNSTWFNSTWSTEGSNNTEGSDTITLPCRIKQIINMWQKVGKAMYAPPISGQIRCSSNITGLLLTRDGGNSNNESEIFRPGGGDMRDNWRSELYKYKVVKIEPLGVAPTKAKRRVVQREKR

SEQ ID NO: 72 - protein, 35 aa, Human immunodeficiency virus 1
CTRPNNNTRKSIHIGPGRAFYTTGEIIGDIRQAHC

SEQ ID NO: 73 - protein, 511 aa, Human immunodeficiency virus 1; identical to SEQ ID NO: 69

SEQ ID NO: 74 - protein, 36 aa, synthetic construct
  REGION 1..36: note = Description of Artificial Sequence: Synthetic polypeptide
RVSLTRHASFDFDTFSFYMDLKALRSDDTAVYFCAR

SEQ ID NO: 75 - protein, 12 aa, synthetic construct
  REGION 1..12: note = Description of Artificial Sequence: Synthetic peptide
GNFGNSYVSWFA

SEQ ID NO: 76 - protein, 5 aa, synthetic construct
  REGION 1..5: note = Description of Artificial Sequence: Synthetic peptide
DSYWS

SEQ ID NO: 77 - protein, 16 aa, synthetic construct
  REGION 1..16: note = Description of Artificial Sequence: Synthetic peptide
YVHKSGDTNYSPSLKS

SEQ ID NO: 78 - protein, 24 aa, synthetic construct
  REGION 1..24: note = Description of Artificial Sequence: Synthetic peptide
TLHGRRIYGIVAFNEWFTYFYMDV

SEQ ID NO: 79 - protein, 11 aa, synthetic construct
  REGION 1..11: note = Description of Artificial Sequence: Synthetic peptide
GEKSLGSRAVQ

SEQ ID NO: 80 - protein, 7 aa, synthetic construct
  REGION 1..7: note = Description of Artificial Sequence: Synthetic peptide
NNQDRPS

SEQ ID NO: 81 - protein, 12 aa, synthetic construct
  REGION 1..12: note = Description of Artificial Sequence: Synthetic peptide
HIWDSRVPTKWV

SEQ ID NO: 82 - protein, 16 aa, synthetic construct
  REGION 1..16: note = Description of Artificial Sequence: Synthetic peptide
YVHKSGDTNYNPSLKS

SEQ ID NO: 83 - protein, 5 aa, synthetic construct
  REGION 1..5: note = Description of Artificial Sequence: Synthetic peptide
NYYWT

SEQ ID NO: 84 - protein, 16 aa, synthetic construct
  REGION 1..16: note = Description of Artificial Sequence: Synthetic peptide
YISDRESATYNPSLNS

SEQ ID NO: 85 - protein, 24 aa, synthetic construct
  REGION 1..24: note = Description of Artificial Sequence: Synthetic peptide
ARRGQRIYGVVSFGEFFYYYSMDV

SEQ ID NO: 86 - protein, 11 aa, synthetic construct
  REGION 1..11: note = Description of Artificial Sequence: Synthetic peptide
GRQALGSRAVQ

SEQ ID NO: 87 - protein, 12 aa, synthetic construct
  REGION 1..12: note = Description of Artificial Sequence: Synthetic peptide
HMWDSRSGFSWS

SEQ ID NO: 88 - protein, 16 aa, synthetic construct
  REGION 1..16: note = Description of Artificial Sequence: Synthetic peptide
YISDRETTTYNPSLNS

SEQ ID NO: 89 - protein, 24 aa, synthetic construct
  REGION 1..24: note = Description of Artificial Sequence: Synthetic peptide
ARRGQRIYGVVSFGEFFYYYYMDV

SEQ ID NO: 90 - protein, 5 aa, synthetic construct
  REGION 1..5: note = Description of Artificial Sequence: Synthetic peptide
GRFWS

SEQ ID NO: 91 - protein, 16 aa, synthetic construct
  REGION 1..16: note = Description of Artificial Sequence: Synthetic peptide
YFSDTDRSEYNPSLRS

SEQ ID NO: 92 - protein, 24 aa, synthetic construct
  REGION 1..24: note = Description of Artificial Sequence: Synthetic peptide
AQQGKRIYGIVSFGEFFYYYYMDA

SEQ ID NO: 93 - protein, 11 aa, synthetic construct
  REGION 1..11: note = Description of Artificial Sequence: Synthetic peptide
GERSRGSRAVQ

SEQ ID NO: 94 - protein, 7 aa, synthetic construct
  REGION 1..7: note = Description of Artificial Sequence: Synthetic peptide
NNQDRPA

SEQ ID NO: 95 - protein, 12 aa, synthetic construct
  REGION 1..12: note = Description of Artificial Sequence: Synthetic peptide
HYWDSRSPISWI

SEQ ID NO: 96 - protein, 24 aa, synthetic construct
  REGION 1..24: note = Description of Artificial Sequence: Synthetic peptide
AQQGKRIYGIVSFGELFYYYYMDA

SEQ ID NO: 97 - protein, 5 aa, synthetic construct
  REGION 1..5: note = Description of Artificial Sequence: Synthetic peptide
DNYWS

SEQ ID NO: 98 - protein, 16 aa, synthetic construct
  REGION 1..16: note = Description of Artificial Sequence: Synthetic peptide
YVHDSGDTNYNPSLKS

SEQ ID NO: 99 - protein, 24 aa, synthetic construct
  REGION 1..24: note = Description of Artificial Sequence: Synthetic peptide
TKHGRRIYGVVAFKEWFTYFYMDV

SEQ ID NO: 100 - protein, 11 aa, synthetic construct
  REGION 1..11: note = Description of Artificial Sequence: Synthetic peptide
GEESLGSRSVI

SEQ ID NO: 101 - protein, 7 aa, synthetic construct
  REGION 1..7: note = Description of Artificial Sequence: Synthetic peptide
NNNDRPS

SEQ ID NO: 102 - protein, 12 aa, synthetic construct
  REGION 1..12: note = Description of Artificial Sequence: Synthetic peptide
HIWDSRRPTNWV

SEQ ID NO: 103 - protein, 5 aa, synthetic construct
  REGION 1..5: note = Description of Artificial Sequence: Synthetic peptide
DAYWS

SEQ ID NO: 104 - protein, 16 aa, synthetic construct
  REGION 1..16: note = Description of Artificial Sequence: Synthetic peptide
YVHHSGDTNYNPSLKR

SEQ ID NO: 105 - protein, 24 aa, synthetic construct
  REGION 1..24: note = Description of Artificial Sequence: Synthetic peptide
ALHGKRIYGIVALGELFTYFYMDV

SEQ ID NO: 106 - protein, 11 aa, synthetic construct
  REGION 1..11: note = Description of Artificial Sequence: Synthetic peptide
GKESIGSRAVQ

SEQ ID NO: 107 - protein, 12 aa, synthetic construct
  REGION 1..12: note = Description of Artificial Sequence: Synthetic peptide
HIYDARGGTNWV

SEQ ID NO: 108 - protein, 7 aa, synthetic construct
  REGION 1..7: note = Description of Artificial Sequence: Synthetic peptide
ACTYFWG

SEQ ID NO: 109 - protein, 22 aa, synthetic construct
  REGION 1..22: note = Description of Artificial Sequence: Synthetic peptide
SLSHCQSFWGSGWTFHNPSLKS

SEQ ID NO: 110 - protein, 19 aa, synthetic construct
  REGION 1..19: note = Description of Artificial Sequence: Synthetic peptide
FDGEVLVYNHWPKPAWVDL

SEQ ID NO: 111 - protein, 9 aa, synthetic construct
  REGION 1..9: note = Description of Artificial Sequence: Synthetic peptide
NGTATNFVS

SEQ ID NO: 112 - protein, 7 aa, synthetic construct
  REGION 1..7: note = Description of Artificial Sequence: Synthetic peptide
GVDKRPP

SEQ ID NO: 113 - protein, 10 aa, synthetic construct
  REGION 1..10: note = Description of Artificial Sequence: Synthetic peptide
GSLVGNWDVI

SEQ ID NO: 114 - protein, 7 aa, synthetic construct
  REGION 1..7: note = Description of Artificial Sequence: Synthetic peptide
ACDYFWG

SEQ ID NO: 115 - protein, 22 aa, synthetic construct
  REGION 1..22: note = Description of Artificial Sequence: Synthetic peptide
GLSHCAGYYNTGWTYHNPSLKS

SEQ ID NO: 116 - protein, 19 aa, synthetic construct
  REGION 1..19: note = Description of Artificial Sequence: Synthetic peptide
FDGEVLVYHDWPKPAWVDL

SEQ ID NO: 117 - protein, 9 aa, synthetic construct
  REGION 1..9: note = Description of Artificial Sequence: Synthetic peptide
TGTSNRFVS

SEQ ID NO: 118 - protein, 7 aa, synthetic construct
  REGION 1..7: note = Description of Artificial Sequence: Synthetic peptide
GVNKRPS

SEQ ID NO: 119 - protein, 10 aa, synthetic construct
  REGION 1..10: note = Description of Artificial Sequence: Synthetic peptide
SSLVGNWDVI

SEQ ID NO: 120 - protein, 22 aa, synthetic construct
  REGION 1..22: note = Description of Artificial Sequence: Synthetic peptide
SLSHCAGYYNSGWTYHNPSLKS

SEQ ID NO: 121 - protein, 19 aa, synthetic construct
  REGION 1..19: note = Description of Artificial Sequence: Synthetic peptide
FGGDVLVYHDWPKPAWVDL

SEQ ID NO: 122 - protein, 9 aa, synthetic construct
  REGION 1..9: note = Description of Artificial Sequence: Synthetic peptide
TGNINNFVS

SEQ ID NO: 123 - protein, 10 aa, synthetic construct
  REGION 1..10: note = Description of Artificial Sequence: Synthetic peptide
GSLAGNWDVV

SEQ ID NO: 124 - protein, 7 aa, synthetic construct
  REGION 1..7: note = Description of Artificial Sequence: Synthetic peptide
ACNSFWG

SEQ ID NO: 125 - protein, 22 aa, synthetic construct
  REGION 1..22: note = Description of Artificial Sequence: Synthetic peptide
SLSHCASYWNRGWTYHNPSLKS

SEQ ID NO: 126 - protein, 19 aa, synthetic construct
  REGION 1..19: note = Description of Artificial Sequence: Synthetic peptide
FGGEVLRYTDWPKPAWVDL

SEQ ID NO: 127 - protein, 9 aa, synthetic construct
  REGION 1..9: note = Description of Artificial Sequence: Synthetic peptide
TGTSNNFVS

SEQ ID NO: 128 - protein, 7 aa, synthetic construct
  REGION 1..7: note = Description of Artificial Sequence: Synthetic peptide
DVNKRPS

SEQ ID NO: 129 - protein, 7 aa, synthetic construct
  REGION 1..7: note = Description of Artificial Sequence: Synthetic peptide
GCDYFWG

SEQ ID NO: 130 - protein, 207 aa, Homo sapiens
MQSGTHWRVLGLCLLSVGVWGQDGNEEMGGITQTPYKVSISGTTVILTCPQYPGSEILWQHNDKNIGGDEDDKNIGSDEDHLSLKEFSELEQSGYYVCYPRGSKPEDANFYLYLRARVCENCMEMDVMSVATIVIVDICITGGLLLLVYYWSKNRKAKAKPVTRGAGAGGRQRGQNKERPPPVPNPDYEPIRKGQRDLYSGLNQRRI

SEQ ID NO: 131 - protein, 19 aa, synthetic construct
  REGION 1..19: note = Description of Artificial Sequence: Synthetic peptide
FDGEVLVYNDWPKPAWVDL

SEQ ID NO: 132 - protein, 7 aa, synthetic construct
  REGION 1..7: note = Description of Artificial Sequence: Synthetic peptide
TGHYYWG

SEQ ID NO: 133 - protein, 16 aa, synthetic construct
  REGION 1..16: note = Description of Artificial Sequence: Synthetic peptide
HIHYTTAVLHNPSLKS

SEQ ID NO: 134 - protein, 19 aa, synthetic construct
  REGION 1..19: note = Description of Artificial Sequence: Synthetic peptide
SGGDILYYYEWQKPHWFSP

SEQ ID NO: 135 - protein, 14 aa, synthetic construct
  REGION 1..14: note = Description of Artificial Sequence: Synthetic peptide
NGTSSDIGGWNFVS

SEQ ID NO: 136 - protein, 7 aa, synthetic construct
  REGION 1..7: note = Description of Artificial Sequence: Synthetic peptide
EVNKRPS

SEQ ID NO: 137 - protein, 10 aa, synthetic construct
  REGION 1..10: note = Description of Artificial Sequence: Synthetic peptide
SSLFGRWDVV

SEQ ID NO: 138 - protein, 12 aa, synthetic construct
  REGION 1..12: note = Description of Artificial Sequence: Synthetic peptide
GTDWGENDFHYG

SEQ ID NO: 139 - protein, 17 aa, synthetic construct
  REGION 1..17: note = Description of Artificial Sequence: Synthetic peptide
SIHWRGRTTHYKTSFRS

SEQ ID NO: 140 - protein, 18 aa, synthetic construct
  REGION 1..18: note = Description of Artificial Sequence: Synthetic peptide
HKYHDIFRVVPVAGWFDP

SEQ ID NO: 141 - protein, 11 aa, synthetic construct
  REGION 1..11: note = Description of Artificial Sequence: Synthetic peptide
RASQNVKNNLA

SEQ ID NO: 142 - protein, 7 aa, synthetic construct
  REGION 1..7: note = Description of Artificial Sequence: Synthetic peptide
DASSRAG

SEQ ID NO: 143 - protein, 9 aa, synthetic construct
  REGION 1..9: note = Description of Artificial Sequence: Synthetic peptide
QQYEEWPRT

SEQ ID NO: 144 - protein, 12 aa, synthetic construct
  REGION 1..12: note = Description of Artificial Sequence: Synthetic peptide
GGEWGDSDYHWG

SEQ ID NO: 145 - protein, 16 aa, synthetic construct
  REGION 1..16: note = Description of Artificial Sequence: Synthetic peptide
SIHWRGTTHYNAPFRG

SEQ ID NO: 146 - protein, 18 aa, synthetic construct
  REGION 1..18: note = Description of Artificial Sequence: Synthetic peptide
HKYHDIVMVVPIAGWFDP

SEQ ID NO: 147 - protein, 11 aa, synthetic construct
  REGION 1..11: note = Description of Artificial Sequence: Synthetic peptide
RASQSVKNNLA

SEQ ID NO: 148 - protein, 7 aa, synthetic construct
  REGION 1..7: note = Description of Artificial Sequence: Synthetic peptide
DTSSRAS

SEQ ID NO: 149 - protein, 12 aa, synthetic construct
  REGION 1..12: note = Description of Artificial Sequence: Synthetic peptide
GGEWGDKDYHWG

SEQ ID NO: 150 - protein, 16 aa, synthetic construct
  REGION 1..16: note = Description of Artificial Sequence: Synthetic peptide
SIHWRGTTHYKESLRR

SEQ ID NO: 151 - protein, 18 aa, synthetic construct
  REGION 1..18: note = Description of Artificial Sequence: Synthetic peptide
HRHHDVFMLVPIAGWFDV

SEQ ID NO: 152 - protein, 11 aa, synthetic construct
  REGION 1..11: note = Description of Artificial Sequence: Synthetic peptide
RASQNINKNLA

SEQ ID NO: 153 - protein, 7 aa, synthetic construct
  REGION 1..7: note = Description of Artificial Sequence: Synthetic peptide
ETYSKIA

SEQ ID NO: 154 - protein, 6 aa, synthetic construct
  REGION 1..6: note = Description of Artificial Sequence: Synthetic peptide
SDHSWT

SEQ ID NO: 155 - protein, 16 aa, synthetic construct
  REGION 1..16: note = Description of Artificial Sequence: Synthetic peptide
DIHYNGATTYNPSLRS

SEQ ID NO: 156 - protein, 21 aa, synthetic construct
  REGION 1..21: note = Description of Artificial Sequence: Synthetic peptide
NAIRIYGVVALGEWFHYGMDV

SEQ ID NO: 157 - protein, 11 aa, synthetic construct
  REGION 1..11: note = Description of Artificial Sequence: Synthetic peptide
SGAPLTSRFTY

SEQ ID NO: 158 - protein, 7 aa, synthetic construct
  REGION 1..7: note = Description of Artificial Sequence: Synthetic peptide
RSSQRSS

SEQ ID NO: 159 - protein, 11 aa, synthetic construct
  REGION 1..11: note = Description of Artificial Sequence: Synthetic peptide
QSSDTSDSYKM

SEQ ID NO: 160 - protein, 5 aa, synthetic construct
  REGION 1..5: note = Description of Artificial Sequence: Synthetic peptide
DYFIH

SEQ ID NO: 161 - protein, 17 aa, synthetic construct
  REGION 1..17: note = Description of Artificial Sequence: Synthetic peptide
WINPKTGQPNNPRQFQG

SEQ ID NO: 162 - protein, 10 aa, synthetic construct
  REGION 1..10: note = Description of Artificial Sequence: Synthetic peptide
QRSDYWDFDV

SEQ ID NO: 163 - protein, 7 aa, synthetic construct
  REGION 1..7: note = Description of Artificial Sequence: Synthetic peptide
QANGYLN

SEQ ID NO: 164 - protein, 7 aa, synthetic construct
  REGION 1..7: note = Description of Artificial Sequence: Synthetic peptide
DGSKLER

SEQ ID NO: 165 - protein, 5 aa, synthetic construct
  REGION 1..5: note = Description of Artificial Sequence: Synthetic peptide
QVYEF

SEQ ID NO: 166 - protein, 5 aa, synthetic construct
  REGION 1..5: note = Description of Artificial Sequence: Synthetic peptide
DHFIH

SEQ ID NO: 167 - protein, 10 aa, synthetic construct
  REGION 1..10: note = Description of Artificial Sequence: Synthetic peptide
QRSDFWDFDV

SEQ ID NO: 168 - protein, 5 aa, synthetic construct
  REGION 1..5: note = Description of Artificial Sequence: Synthetic peptide
NCPIN

SEQ ID NO: 169 - protein, 17 aa, synthetic construct
  REGION 1..17: note = Description of Artificial Sequence: Synthetic peptide
WMKPRGGAVSYARQLQG

SEQ ID NO: 170 - protein, 16 aa, synthetic construct
  REGION 1..16: note = Description of Artificial Sequence: Synthetic peptide
GKYCTARDYYNWDFEH

SEQ ID NO: 171 - protein, 9 aa, synthetic construct
  REGION 1..9: note = Description of Artificial Sequence: Synthetic peptide
RTSQYGSLA

SEQ ID NO: 172 - protein, 7 aa, synthetic construct
  REGION 1..7: note = Description of Artificial Sequence: Synthetic peptide
SGSTRAA

SEQ ID NO: 173 - protein, 5 aa, synthetic construct
  REGION 1..5: note = Description of Artificial Sequence: Synthetic peptide
QQYEF

SEQ ID NO: 174 - protein, 17 aa, synthetic construct
  REGION 1..17: note = Description of Artificial Sequence: Synthetic peptide
WMKPRHGAVSYARQLQG

SEQ ID NO: 175 - protein, 5 aa, synthetic construct
  REGION 1..5: note = Description of Artificial Sequence: Synthetic peptide
DCTLN

SEQ ID NO: 176 - protein, 17 aa, synthetic construct
  REGION 1..17: note = Description of Artificial Sequence: Synthetic peptide
WLKPRGGAVNYARPLQG

SEQ ID NO: 177 - protein, 12 aa, synthetic construct
  REGION 1..12: note = Description of Artificial Sequence: Synthetic peptide
GKNCDYNWDFEH

SEQ ID NO: 178 - protein, 5 aa, synthetic construct
  REGION 1..5: note = Description of Artificial Sequence: Synthetic peptide
AHILF

SEQ ID NO: 179 - protein, 17 aa, synthetic construct
  REGION 1..17: note = Description of Artificial Sequence: Synthetic peptide
WIKPQYGAVNFGGGFRD

SEQ ID NO: 180 - protein, 13 aa, synthetic construct
  REGION 1..13: note = Description of Artificial Sequence: Synthetic peptide
DRSYGDSSWALDA

SEQ ID NO: 181 - protein, 11 aa, synthetic construct
  REGION 1..11: note = Description of Artificial Sequence: Synthetic peptide
QTSQGVGSDLH

SEQ ID NO: 182 - protein, 7 aa, synthetic construct
  REGION 1..7: note = Description of Artificial Sequence: Synthetic peptide
HTSSVED

SEQ ID NO: 183 - protein, 5 aa, synthetic construct
  REGION 1..5: note = Description of Artificial Sequence: Synthetic peptide
QVLQF

SEQ ID NO: 184 - protein, 11 aa, synthetic construct
  REGION 1..11: note = Description of Artificial Sequence: Synthetic peptide
SGFDFSRQGMH

SEQ ID NO: 185 - protein, 16 aa, synthetic construct
  REGION 1..16: note = Description of Artificial Sequence: Synthetic peptide
FIKYDGSEKYHADSVW

SEQ ID NO: 186 - protein, 28 aa, synthetic construct
  REGION 1..28: note = Description of Artificial Sequence: Synthetic peptide
EAGGPDYRNGYNYYDFYDGYYNYHYMDV

SEQ ID NO: 187 - protein, 14 aa, synthetic construct
  REGION 1..14: note = Description of Artificial Sequence: Synthetic peptide
NGTSNDVGGYESVS

SEQ ID NO: 188 - protein, 8 aa, synthetic construct
  REGION 1..8: note = Description of Artificial Sequence: Synthetic peptide
DVSKRPSG

SEQ ID NO: 189 - protein, 10 aa, synthetic construct
  REGION 1..10: note = Description of Artificial Sequence: Synthetic peptide
KSLTSTRRRV

SEQ ID NO: 190 - protein, 11 aa, synthetic construct
  REGION 1..11: note = Description of Artificial Sequence: Synthetic peptide
SGFTFHKYGMH

SEQ ID NO: 191 - protein, 16 aa, synthetic construct
  REGION 1..16: note = Description of Artificial Sequence: Synthetic peptide
LISDDGMRKYHSDSMW

SEQ ID NO: 192 - protein, 28 aa, synthetic construct
  REGION 1..28: note = Description of Artificial Sequence: Synthetic peptide
EAGGPIWHDDVKYYDFNDGYYNYHYMDV

SEQ ID NO: 193 - protein, 14 aa, synthetic construct
  REGION 1..14: note = Description of Artificial Sequence: Synthetic peptide
NGTSSDVGGFDSVS

SEQ ID NO: 194 - protein, 8 aa, synthetic construct
  REGION 1..8: note = Description of Artificial Sequence: Synthetic peptide
DVSHRPSG

SEQ ID NO: 195 - protein, 10 aa, synthetic construct
  REGION 1..10: note = Description of Artificial Sequence: Synthetic peptide
SSLTDRSHRI

SEQ ID NO: 196 - protein, 5 aa, synthetic construct
  REGION 1..5: note = Description of Artificial Sequence: Synthetic peptide
DYYLH

SEQ ID NO: 197 - protein, 17 aa, synthetic construct
  REGION 1..17: note = Description of Artificial Sequence: Synthetic peptide
LIDPENGEARYAEKFQG

SEQ ID NO: 198 - protein, 13 aa, synthetic construct
  REGION 1..13: note = Description of Artificial Sequence: Synthetic peptide
GAVGADSGSWFDP

SEQ ID NO: 199 - protein, 11 aa, synthetic construct
  REGION 1..11: note = Description of Artificial Sequence: Synthetic peptide
SGSKLGDKYVS

SEQ ID NO: 200 - protein, 7 aa, synthetic construct
  REGION 1..7: note = Description of Artificial Sequence: Synthetic peptide
ENDRRPS

SEQ ID NO: 201 - protein, 11 aa, synthetic construct
  REGION 1..11: note = Description of Artificial Sequence: Synthetic peptide
QAWETTTTTFV

SEQ ID NO: 202 - protein, 5 aa, synthetic construct
  REGION 1..5: note = Description of Artificial Sequence: Synthetic peptide
SYAFS

SEQ ID NO: 203 - protein, 17 aa, synthetic construct
  REGION 1..17: note = Description of Artificial Sequence: Synthetic peptide
MITPVFGETKYAPRFQG

SEQ ID NO: 204 - protein, 15 aa, synthetic construct
  REGION 1..15: note = Description of Artificial Sequence: Synthetic peptide
DRRVVPMATDNWLDP

SEQ ID NO: 205 - protein, 11 aa, synthetic construct
  REGION 1..11: note = Description of Artificial Sequence: Synthetic peptide
RASQTIHTYLN

SEQ ID NO: 206 - protein, 7 aa, synthetic construct
  REGION 1..7: note = Description of Artificial Sequence: Synthetic peptide
GASTLQS

SEQ ID NO: 207 - protein, 9 aa, synthetic construct
  REGION 1..9: note = Description of Artificial Sequence: Synthetic peptide
QQSYSTPRT

SEQ ID NO: 208 - protein, 5 aa, synthetic construct
  REGION 1..5: note = Description of Artificial Sequence: Synthetic peptide
NHDVH

SEQ ID NO: 209 - protein, 17 aa, synthetic construct
  REGION 1..17: note = Description of Artificial Sequence: Synthetic peptide
WMSHEGDKTGLAQKFQG

SEQ ID NO: 210 - protein, 31 aa, synthetic construct
  REGION 1..31: note = Description of Artificial Sequence: Synthetic polypeptide
GSKHRLRDYFLYNEYGPNYEEWGDYLATLDV

SEQ ID NO: 211 - protein, 16 aa, synthetic construct
  REGION 1..16: note = Description of Artificial Sequence: Synthetic peptide
KCSHSLQHSTGANYLA

SEQ ID NO: 212 - protein, 7 aa, synthetic construct
  REGION 1..7: note = Description of Artificial Sequence: Synthetic peptide
LATHRAS

SEQ ID NO: 213 - protein, 9 aa, synthetic construct
  REGION 1..9: note = Description of Artificial Sequence: Synthetic peptide
MQGLHSPWT

SEQ ID NO: 214 - protein, 5 aa, synthetic construct
  REGION 1..5: note = Description of Artificial Sequence: Synthetic peptide
KYDVH

SEQ ID NO: 215 - protein, 17 aa, synthetic construct
  REGION 1..17: note = Description of Artificial Sequence: Synthetic peptide
WISHERDKTESAQRFKG

SEQ ID NO: 216 - protein, 32 aa, synthetic construct
  REGION 1..32: note = Description of Artificial Sequence: Synthetic polypeptide
GSKHRLRDYVLYDDYGLINYQEWNDYLEFLDV

SEQ ID NO: 217 - protein, 16 aa, synthetic construct
  REGION 1..16: note = Description of Artificial Sequence: Synthetic peptide
SSTQSLRHSNGANYLA

SEQ ID NO: 218 - protein, 7 aa, synthetic construct
  REGION 1..7: note = Description of Artificial Sequence: Synthetic peptide
LGSQRAS

SEQ ID NO: 219 - protein, 9 aa, synthetic construct
  REGION 1..9: note = Description of Artificial Sequence: Synthetic peptide
MQGLNRPWT

SEQ ID NO: 220 - protein, 17 aa, synthetic construct
  REGION 1..17: note = Description of Artificial Sequence: Synthetic peptide
WMSHEGDKTESAQRFKG

SEQ ID NO: 221 - protein, 16 aa, synthetic construct
  REGION 1..16: note = Description of Artificial Sequence: Synthetic peptide
TSTQSLRHSNGANYLA

SEQ ID NO: 222 - protein, 32 aa, synthetic construct
  REGION 1..32: note = Description of Artificial Sequence: Synthetic polypeptide
GSKHRLRDYVLYDDYGLINQQEWNDYLEFLDV

SEQ ID NO: 223 - protein, 5 aa, synthetic construct
  REGION 1..5: note = Description of Artificial Sequence: Synthetic peptide
KYPMY

SEQ ID NO: 224 - protein, 17 aa, synthetic construct
  REGION 1..17: note = Description of Artificial Sequence: Synthetic peptide
AISGDAWHVVYSNSVQG

SEQ ID NO: 225 - protein, 26 aa, synthetic construct
  REGION 1..26: note = Description of Artificial Sequence: Synthetic peptide
MFQESGPPRLDRWSGRNYYYYSGMDV

SEQ ID NO: 226 - protein, 16 aa, synthetic construct
  REGION 1..16: note = Description of Artificial Sequence: Synthetic peptide
KSSESLRQSNGKTSLY

SEQ ID NO: 227 - protein, 7 aa, synthetic construct
  REGION 1..7: note = Description of Artificial Sequence: Synthetic peptide
EVSNRFS

SEQ ID NO: 228 - protein, 9 aa, synthetic construct
  REGION 1..9: note = Description of Artificial Sequence: Synthetic peptide
MQSKDFPLT

SEQ ID NO: 229 - protein, 6 aa, synthetic construct
  REGION 1..6: note = Description of Artificial Sequence: Synthetic peptide
GLYAVN

SEQ ID NO: 230 - protein, 15 aa, synthetic construct
  REGION 1..15: note = Description of Artificial Sequence: Synthetic peptide
QIWRWKSSASHHFRG

SEQ ID NO: 231 - protein, 20 aa, synthetic construct
  REGION 1..20: note = Description of Artificial Sequence: Synthetic peptide
TSTYDKWSGLHHDGVMAFSS

SEQ ID NO: 232 - protein, 12 aa, synthetic construct
  REGION 1..12: note = Description of Artificial Sequence: Synthetic peptide
RASQSITGNWVA

SEQ ID NO: 233 - protein, 7 aa, synthetic construct
  REGION 1..7: note = Description of Artificial Sequence: Synthetic peptide
RGAALLG

SEQ ID NO: 234 - protein, 9 aa, synthetic construct
  REGION 1..9: note = Description of Artificial Sequence: Synthetic peptide
QQYDTYPGT

SEQ ID NO: 235 - protein, 6 aa, synthetic construct
  REGION 1..6: note = Description of Artificial Sequence: Synthetic peptide
GASISD

SEQ ID NO: 236 - skipped

SEQ ID NO: 237 - protein, 22 aa, synthetic construct
  REGION 1..22: note = Description of Artificial Sequence: Synthetic peptide
LHGRRIYGIVAFNEWFTYFYMD

SEQ ID NO: 238 - protein, 8 aa, synthetic construct
  REGION 1..8: note = Description of Artificial Sequence: Synthetic peptide
EKSLGSRA

SEQ ID NO: 239 - skipped

SEQ ID NO: 240 - protein, 9 aa, synthetic construct
  REGION 1..9: note = Description of Artificial Sequence: Synthetic peptide
WDSRVPTKW

SEQ ID NO: 241 - protein, 7 aa, synthetic construct
  REGION 1..7: note = Description of Artificial Sequence: Synthetic peptide
GDSMNNY

SEQ ID NO: 242 - skipped

SEQ ID NO: 243 - protein, 22 aa, synthetic construct
  REGION 1..22: note = Description of Artificial Sequence: Synthetic peptide
RRGQRIYGVVSFGEFFYYYSMD

SEQ ID NO: 244 - protein, 8 aa, synthetic construct
  REGION 1..8: note = Description of Artificial Sequence: Synthetic peptide
RQALGSRA

SEQ ID NO: 245 - protein, 9 aa, synthetic construct
  REGION 1..9: note = Description of Artificial Sequence: Synthetic peptide
WDSRSGFSW

SEQ ID NO: 246 - protein, 7 aa, synthetic construct
  REGION 1..7: note = Description of Artificial Sequence: Synthetic peptide
GGSISNY

SEQ ID NO: 247 - protein, 22 aa, synthetic construct
  REGION 1..22: note = Description of Artificial Sequence: Synthetic peptide
RRGQRIYGVVSFGEFFYYYYMD

SEQ ID NO: 248 - protein, 7 aa, synthetic construct
  REGION 1..7: note = Description of Artificial Sequence: Synthetic peptide
NGSVSGR

SEQ ID NO: 249 - skipped

SEQ ID NO: 250 - protein, 22 aa, synthetic construct
  REGION 1..22: note = Description of Artificial Sequence: Synthetic peptide
QQGKRIYGIVSFGEFFYYYYMD

SEQ ID NO: 251 - protein, 8 aa, synthetic construct
  REGION 1..8: note = Description of Artificial Sequence: Synthetic peptide
ERSRGSRA

SEQ ID NO: 252 - protein, 9 aa, synthetic construct
  REGION 1..9: note = Description of Artificial Sequence: Synthetic peptide
WDSRSPISW

SEQ ID NO: 253 - protein, 22 aa, synthetic construct
  REGION 1..22: note = Description of Artificial Sequence: Synthetic peptide
QQGKRIYGIVSFGELFYYYYMD

SEQ ID NO: 254 - protein, 7 aa, synthetic construct
  REGION 1..7: note = Description of Artificial Sequence: Synthetic peptide
GTLVRDN

SEQ ID NO: 255 - skipped

SEQ ID NO: 256 - protein, 22 aa, synthetic construct
  REGION 1..22: note = Description of Artificial Sequence: Synthetic peptide
KHGRRIYGVVAFKEWFTYFYMD

SEQ ID NO: 257 - protein, 8 aa, synthetic construct
  REGION 1..8: note = Description of Artificial Sequence: Synthetic peptide
EESLGSRS

SEQ ID NO: 258 - skipped

SEQ ID NO: 259 - protein, 9 aa, synthetic construct
  REGION 1..9: note = Description of Artificial Sequence: Synthetic peptide
WDSRRPTNW

SEQ ID NO: 260 - protein, 7 aa, synthetic construct
  REGION 1..7: note = Description of Artificial Sequence: Synthetic peptide
GASINDA

SEQ ID NO: 261 - skipped

SEQ ID NO: 262 - protein, 22 aa, synthetic construct
  REGION 1..22: note = Description of Artificial Sequence: Synthetic peptide
LHGKRIYGIVALGELFTYFYMD

SEQ ID NO: 263 - protein, 8 aa, synthetic construct
  REGION 1..8: note = Description of Artificial Sequence: Synthetic peptide
KESIGSRA

SEQ ID NO: 264 - protein, 9 aa, synthetic construct
  REGION 1..9: note = Description of Artificial Sequence: Synthetic peptide
YDARGGTNW

SEQ ID NO: 265 - protein, 9 aa, synthetic construct
  REGION 1..9: note = Description of Artificial Sequence: Synthetic peptide
GESTGACTY

SEQ ID NO: 266 - protein, 9 aa, synthetic construct
  REGION 1..9: note = Description of Artificial Sequence: Synthetic peptide
HCQSFWGSG

SEQ ID NO: 267 - protein, 17 aa, synthetic construct
  REGION 1..17: note = Description of Artificial Sequence: Synthetic peptide
DGEVLVYNHWPKPAWVD

SEQ ID NO: 268 - protein, 6 aa, synthetic construct
  REGION 1..6: note = Description of Artificial Sequence: Synthetic peptide
GTATNF

SEQ ID NO: 269 - skipped

SEQ ID NO: 270 - protein, 7 aa, synthetic construct
  REGION 1..7: note = Description of Artificial Sequence: Synthetic peptide
LVGNWDV

SEQ ID NO: 271 - protein, 9 aa, synthetic construct
  REGION 1..9: note = Description of Artificial Sequence: Synthetic peptide
GDSTAACDY

SEQ ID NO: 272 - protein, 9 aa, synthetic construct
  REGION 1..9: note = Description of Artificial Sequence: Synthetic peptide
HCAGYYNTG

SEQ ID NO: 273 - protein, 17 aa, synthetic construct
  REGION 1..17: note = Description of Artificial Sequence: Synthetic peptide
DGEVLVYHDWPKPAWVD

SEQ ID NO: 274 - protein, 6 aa, synthetic construct
  REGION 1..6: note = Description of Artificial Sequence: Synthetic peptide
GTSNRF

SEQ ID NO: 275 - skipped

SEQ ID NO: 276 - protein, 9 aa, synthetic construct
  REGION 1..9: note = Description of Artificial Sequence: Synthetic peptide
HCAGYYNSG

SEQ ID NO: 277 - protein, 17 aa, synthetic construct
  REGION 1..17: note = Description of Artificial Sequence: Synthetic peptide
GGDVLVYHDWPKPAWVD

SEQ ID NO: 278 - protein, 6 aa, synthetic construct
  REGION 1..6: note = Description of Artificial Sequence: Synthetic peptide
GNINNF

SEQ ID NO: 279 - protein, 7 aa, synthetic construct
  REGION 1..7: note = Description of Artificial Sequence: Synthetic peptide
LAGNWDV

SEQ ID NO: 280 - protein, 9 aa, synthetic construct
  REGION 1..9: note = Description of Artificial Sequence: Synthetic peptide
GDSTAACNS

SEQ ID NO: 281 - protein, 9 aa, synthetic construct
  REGION 1..9: note = Description of Artificial Sequence: Synthetic peptide
HCASYWNRG

SEQ ID NO: 282 - protein, 17 aa, synthetic construct
  REGION 1..17: note = Description of Artificial Sequence: Synthetic peptide
GGEVLRYTDWPKPAWVD

SEQ ID NO: 283 - protein, 6 aa, synthetic construct
  REGION 1..6: note = Description of Artificial Sequence: Synthetic peptide
GTSNNF

SEQ ID NO: 284 - skipped

SEQ ID NO: 285 - protein, 9 aa, synthetic construct
  REGION 1..9: note = Description of Artificial Sequence: Synthetic peptide
GDSTAGCDY

SEQ ID NO: 286 - protein, 17 aa, synthetic construct
  REGION 1..17: note = Description of Artificial Sequence: Synthetic peptide
DGEVLVYNDWPKPAWVD

SEQ ID NO: 287 - protein, 9 aa, synthetic construct
  REGION 1..9: note = Description of Artificial Sequence: Synthetic peptide
GESINTGHY

SEQ ID NO: 288 - skipped

SEQ ID NO: 289 - protein, 17 aa, synthetic construct
  REGION 1..17: note = Description of Artificial Sequence: Synthetic peptide
GGDILYYYEWQKPHWFS

SEQ ID NO: 290 - protein, 11 aa, synthetic construct
  REGION 1..11: note = Description of Artificial Sequence: Synthetic peptide
GTSSDIGGWNF

SEQ ID NO: 291 - skipped

SEQ ID NO: 292 - protein, 7 aa, synthetic construct
  REGION 1..7: note = Description of Artificial Sequence: Synthetic peptide
LFGRWDV

SEQ ID NO: 293 - protein, 14 aa, synthetic construct
  REGION 1..14: note = Description of Artificial Sequence: Synthetic peptide
GGSMRGTDWGENDF

SEQ ID NO: 294 - protein, 4 aa, synthetic construct
  REGION 1..4: note = Description of Artificial Sequence: Synthetic peptide
WRGR

SEQ ID NO: 295 - protein, 16 aa, synthetic construct
  REGION 1..16: note = Description of Artificial Sequence: Synthetic peptide
KYHDIFRVVPVAGWFD

SEQ ID NO: 296 - protein, 7 aa, synthetic construct
  REGION 1..7: note = Description of Artificial Sequence: Synthetic peptide
SQNVKNN

SEQ ID NO: 297 - skipped

SEQ ID NO: 298 - protein, 6 aa, synthetic construct
  REGION 1..6: note = Description of Artificial Sequence: Synthetic peptide
YEEWPR

SEQ ID NO: 299 - protein, 14 aa, synthetic construct
  REGION 1..14: note = Description of Artificial Sequence: Synthetic peptide
GGSIRGGEWGDSDY

SEQ ID NO: 300 - skipped

SEQ ID NO: 301 - protein, 16 aa, synthetic construct
  REGION 1..16: note = Description of Artificial Sequence: Synthetic peptide
KYHDIVMVVPIAGWFD

SEQ ID NO: 302 - protein, 7 aa, synthetic construct
  REGION 1..7: note = Description of Artificial Sequence: Synthetic peptide
SQSVKNN

SEQ ID NO: 303 - skipped

SEQ ID NO: 304 - protein, 14 aa, synthetic construct
  REGION 1..14: note = Description of Artificial Sequence: Synthetic peptide
GDSIRGGEWGDKDY

SEQ ID NO: 305 - protein, 16 aa, synthetic construct
  REGION 1..16: note = Description of Artificial Sequence: Synthetic peptide
RHHDVFMLVPIAGWFD

SEQ ID NO: 306 - protein, 7 aa, synthetic construct
  REGION 1..7: note = Description of Artificial Sequence: Synthetic peptide
SQNINKN

SEQ ID NO: 307 - skipped

SEQ ID NO: 308 - protein, 8 aa, synthetic construct
  REGION 1..8: note = Description of Artificial Sequence: Synthetic peptide
QDSRPSDH

SEQ ID NO: 309 - skipped

SEQ ID NO: 310 - protein, 19 aa, synthetic construct
  REGION 1..19: note = Description of Artificial Sequence: Synthetic peptide
AIRIYGVVALGEWFHYGMD

SEQ ID NO: 311 - protein, 8 aa, synthetic construct
  REGION 1..8: note = Description of Artificial Sequence: Synthetic peptide
GAPLTSRF

SEQ ID NO: 312 - skipped

SEQ ID NO: 313 - protein, 8 aa, synthetic construct
  REGION 1..8: note = Description of Artificial Sequence: Synthetic peptide
SDTSDSYK

SEQ ID NO: 314 - protein, 7 aa, synthetic construct
  REGION 1..7: note = Description of Artificial Sequence: Synthetic peptide
GYNIRDY

SEQ ID NO: 315 - protein, 4 aa, synthetic construct
  REGION 1..4: note = Description of Artificial Sequence: Synthetic peptide
PKTG

SEQ ID NO: 316 - protein, 8 aa, synthetic construct
  REGION 1..8: note = Description of Artificial Sequence: Synthetic peptide
RSDYWDFD

SEQ ID NO: 317-318 - skipped (2 entries)

SEQ ID NO: 319 - protein, 171 aa, Homo sapiens
MEHSTFLSGLVLATLLSQVSPFKIPIEELEDRVFVNCNTSITWVEGTVGTLLSDITRLDLGKRILDPRGIYRCNGTDIYKDKESTVQVHYRMCQSCVELDPATVAGIIVTDVIATLLLALGVFCFAGHETGRLSGAADTQALLRNDQVYQPLRDRDDAQYSHLGGNWARNK

SEQ ID NO: 320 - protein, 7 aa, synthetic construct
  REGION 1..7: note = Description of Artificial Sequence: Synthetic peptide
GYKISDH

SEQ ID NO: 321 - protein, 8 aa, synthetic construct
  REGION 1..8: note = Description of Artificial Sequence: Synthetic peptide
RSDFWDFD

SEQ ID NO: 322 - protein, 7 aa, synthetic construct
  REGION 1..7: note = Description of Artificial Sequence: Synthetic peptide
GYEFINC

SEQ ID NO: 323 - protein, 4 aa, synthetic construct
  REGION 1..4: note = Description of Artificial Sequence: Synthetic peptide
PRGG

SEQ ID NO: 324 - protein, 14 aa, synthetic construct
  REGION 1..14: note = Description of Artificial Sequence: Synthetic peptide
KYCTARDYYNWDFE

SEQ ID NO: 325 - protein, 5 aa, synthetic construct
  REGION 1..5: note = Description of Artificial Sequence: Synthetic peptide
SQYGS

SEQ ID NO: 326-327 - skipped (2 entries)

SEQ ID NO: 328 - protein, 4 aa, synthetic construct
  REGION 1..4: note = Description of Artificial Sequence: Synthetic peptide
PRHG

SEQ ID NO: 329 - protein, 7 aa, synthetic construct
  REGION 1..7: note = Description of Artificial Sequence: Synthetic peptide
GYEFIDC

SEQ ID NO: 330 - protein, 10 aa, synthetic construct
  REGION 1..10: note = Description of Artificial Sequence: Synthetic peptide
KNCDYNWDFE

SEQ ID NO: 331 - protein, 7 aa, synthetic construct
  REGION 1..7: note = Description of Artificial Sequence: Synthetic peptide
GYTFTAH

SEQ ID NO: 332 - protein, 4 aa, synthetic construct
  REGION 1..4: note = Description of Artificial Sequence: Synthetic peptide
PQYG

SEQ ID NO: 333 - protein, 11 aa, synthetic construct
  REGION 1..11: note = Description of Artificial Sequence: Synthetic peptide
RSYGDSSWALD

SEQ ID NO: 334 - protein, 7 aa, synthetic construct
  REGION 1..7: note = Description of Artificial Sequence: Synthetic peptide
SQGVGSD

SEQ ID NO: 335-336 - skipped (2 entries)

SEQ ID NO: 337 - protein, 7 aa, synthetic construct
  REGION 1..7: note = Description of Artificial Sequence: Synthetic peptide
GFDFSRQ

SEQ ID NO: 338 - protein, 4 aa, synthetic construct
  REGION 1..4: note = Description of Artificial Sequence: Synthetic peptide
YDGS

SEQ ID NO: 339 - protein, 26 aa, synthetic construct
  REGION 1..26: note = Description of Artificial Sequence: Synthetic peptide
AGGPDYRNGYNYYDFYDGYYNYHYMD

SEQ ID NO: 340 - protein, 11 aa, synthetic construct
  REGION 1..11: note = Description of Artificial Sequence: Synthetic peptide
GTSNDVGGYES

SEQ ID NO: 341 - skipped

SEQ ID NO: 342 - protein, 7 aa, synthetic construct
  REGION 1..7: note = Description of Artificial Sequence: Synthetic peptide
LTSTRRR

SEQ ID NO: 343 - protein, 7 aa, synthetic construct
  REGION 1..7: note = Description of Artificial Sequence: Synthetic peptide
GFTFHKY

SEQ ID NO: 344 - protein, 4 aa, synthetic construct
  REGION 1..4: note = Description of Artificial Sequence: Synthetic peptide
DDGM

SEQ ID NO: 345 - protein, 26 aa, synthetic construct
  REGION 1..26: note = Description of Artificial Sequence: Synthetic peptide
AGGPIWHDDVKYYDFNDGYYNYHYMD

SEQ ID NO: 346 - protein, 11 aa, synthetic construct
  REGION 1..11: note = Description of Artificial Sequence: Synthetic peptide
GTSSDVGGFDS

SEQ ID NO: 347 - protein, 7 aa, synthetic construct
  REGION 1..7: note = Description of Artificial Sequence: Synthetic peptide
LTDRSHR

SEQ ID NO: 348 - protein, 7 aa, synthetic construct
  REGION 1..7: note = Description of Artificial Sequence: Synthetic peptide
GYSFIDY

SEQ ID NO: 349 - protein, 4 aa, synthetic construct
  REGION 1..4: note = Description of Artificial Sequence: Synthetic peptide
PENG

SEQ ID NO: 350 - protein, 11 aa, synthetic construct
  REGION 1..11: note = Description of Artificial Sequence: Synthetic peptide
AVGADSGSWFD

SEQ ID NO: 351 - protein, 8 aa, synthetic construct
  REGION 1..8: note = Description of Artificial Sequence: Synthetic peptide
GSKLGDKY

SEQ ID NO: 352 - skipped

SEQ ID NO: 353 - protein, 8 aa, synthetic construct
  REGION 1..8: note = Description of Artificial Sequence: Synthetic peptide
WETTTTTF

SEQ ID NO: 354 - protein, 7 aa, synthetic construct
  REGION 1..7: note = Description of Artificial Sequence: Synthetic peptide
GGAFSSY

SEQ ID NO: 355 - protein, 4 aa, synthetic construct
  REGION 1..4: note = Description of Artificial Sequence: Synthetic peptide
PVFG

SEQ ID NO: 356 - protein, 13 aa, synthetic construct
  REGION 1..13: note = Description of Artificial Sequence: Synthetic peptide
RRVVPMATDNWLD

SEQ ID NO: 357 - protein, 7 aa, synthetic construct
  REGION 1..7: note = Description of Artificial Sequence: Synthetic peptide
SQTIHTY

SEQ ID NO: 358 - skipped

SEQ ID NO: 359 - protein, 6 aa, synthetic construct
  REGION 1..6: note = Description of Artificial Sequence: Synthetic peptide
SYSTPR

SEQ ID NO: 360 - protein, 7 aa, synthetic construct
  REGION 1..7: note = Description of Artificial Sequence: Synthetic peptide
GNSFSNH

SEQ ID NO: 361 - protein, 4 aa, synthetic construct
  REGION 1..4: note = Description of Artificial Sequence: Synthetic peptide
HEGD

SEQ ID NO: 362 - protein, 29 aa, synthetic construct
  REGION 1..29: note = Description of Artificial Sequence: Synthetic peptide
SKHRLRDYFLYNEYGPNYEEWGDYLATLD

SEQ ID NO: 363 - protein, 12 aa, synthetic construct
  REGION 1..12: note = Description of Artificial Sequence: Synthetic peptide
SHSLQHSTGANY

SEQ ID NO: 364 - skipped

SEQ ID NO: 365 - protein, 6 aa, synthetic construct
  REGION 1..6: note = Description of Artificial Sequence: Synthetic peptide
GLHSPW

SEQ ID NO: 366 - protein, 7 aa, synthetic construct
  REGION 1..7: note = Description of Artificial Sequence: Synthetic peptide
GNTFSKY

SEQ ID NO: 367 - protein, 4 aa, synthetic construct
  REGION 1..4: note = Description of Artificial Sequence: Synthetic peptide
HERD

SEQ ID NO: 368 - protein, 30 aa, synthetic construct
  REGION 1..30: note = Description of Artificial Sequence: Synthetic polypeptide
SKHRLRDYVLYDDYGLINYQEWNDYLEFLD

SEQ ID NO: 369 - protein, 12 aa, synthetic construct
  REGION 1..12: note = Description of Artificial Sequence: Synthetic peptide
TQSLRHSNGANY

SEQ ID NO: 370 - skipped

SEQ ID NO: 371 - protein, 6 aa, synthetic construct
  REGION 1..6: note = Description of Artificial Sequence: Synthetic peptide
GLNRPW

SEQ ID NO: 372 - protein, 7 aa, synthetic construct
  REGION 1..7: note = Description of Artificial Sequence: Synthetic peptide
GNTFRKY

SEQ ID NO: 373 - protein, 30 aa, synthetic construct
  REGION 1..30: note = Description of Artificial Sequence: Synthetic polypeptide
SKHRLRDYVLYDDYGLINQQEWNDYLEFLD

SEQ ID NO: 374 - protein, 7 aa, synthetic construct
  REGION 1..7: note = Description of Artificial Sequence: Synthetic peptide
DFPFSKY

SEQ ID NO: 375 - protein, 4 aa, synthetic construct
  REGION 1..4: note = Description of Artificial Sequence: Synthetic peptide
GDAW

SEQ ID NO: 376 - protein, 24 aa, synthetic construct
  REGION 1..24: note = Description of Artificial Sequence: Synthetic peptide
FQESGPPRLDRWSGRNYYYYSGMD

SEQ ID NO: 377 - protein, 12 aa, synthetic construct
  REGION 1..12: note = Description of Artificial Sequence: Synthetic peptide
SESLRQSNGKTS

SEQ ID NO: 378 - skipped

SEQ ID NO: 379 - protein, 6 aa, synthetic construct
  REGION 1..6: note = Description of Artificial Sequence: Synthetic peptide
SKDFPL

SEQ ID NO: 380 - protein, 8 aa, synthetic construct
  REGION 1..8: note = Description of Artificial Sequence: Synthetic peptide
GVNTFGLY

SEQ ID NO: 381 - skipped

SEQ ID NO: 382 - protein, 18 aa, synthetic construct
  REGION 1..18: note = Description of Artificial Sequence: Synthetic peptide
STYDKWSGLHHDGVMAFS

SEQ ID NO: 383 - protein, 8 aa, synthetic construct
  REGION 1..8: note = Description of Artificial Sequence: Synthetic peptide
SQSITGNW

SEQ ID NO: 384 - skipped

SEQ ID NO: 385 - protein, 6 aa, synthetic construct
  REGION 1..6: note = Description of Artificial Sequence: Synthetic peptide
YDTYPG

SEQ ID NO: 386 - protein, 8 aa, synthetic construct
  REGION 1..8: note = Description of Artificial Sequence: Synthetic peptide
GASISDSY

SEQ ID NO: 387 - protein, 7 aa, synthetic construct
  REGION 1..7: note = Description of Artificial Sequence: Synthetic peptide
VHKSGDT

SEQ ID NO: 388 - protein, 26 aa, synthetic construct
  REGION 1..26: note = Description of Artificial Sequence: Synthetic peptide
ARTLHGRRIYGIVAFNEWFTYFYMDV

SEQ ID NO: 389 - protein, 6 aa, synthetic construct
  REGION 1..6: note = Description of Artificial Sequence: Synthetic peptide
SLGSRA

SEQ ID NO: 390 - protein, 8 aa, synthetic construct
  REGION 1..8: note = Description of Artificial Sequence: Synthetic peptide
GDSMNNYY

SEQ ID NO: 391 - protein, 7 aa, synthetic construct
  REGION 1..7: note = Description of Artificial Sequence: Synthetic peptide
ISDRESA

SEQ ID NO: 392 - protein, 26 aa, synthetic construct
  REGION 1..26: note = Description of Artificial Sequence: Synthetic peptide
ATARRGQRIYGVVSFGEFFYYYSMDV

SEQ ID NO: 393 - protein, 6 aa, synthetic construct
  REGION 1..6: note = Description of Artificial Sequence: Synthetic peptide
ALGSRA

SEQ ID NO: 394 - protein, 26 aa, synthetic construct
  REGION 1..26: note = Description of Artificial Sequence: Synthetic peptide
ARARRGQRIYGVVSFGEFFYYYSMDV

SEQ ID NO: 395 - protein, 8 aa, synthetic construct
  REGION 1..8: note = Description of Artificial Sequence: Synthetic peptide
GGSISNYY

SEQ ID NO: 396 - protein, 7 aa, synthetic construct
  REGION 1..7: note = Description of Artificial Sequence: Synthetic peptide
ISDRETT

SEQ ID NO: 397 - protein, 26 aa, synthetic construct
  REGION 1..26: note = Description of Artificial Sequence: Synthetic peptide
ATARRGQRIYGVVSFGEFFYYYYMDV

SEQ ID NO: 398 - protein, 8 aa, synthetic construct
  REGION 1..8: note = Description of Artificial Sequence: Synthetic peptide
NGSVSGRF

SEQ ID NO: 399 - protein, 7 aa, synthetic construct
  REGION 1..7: note = Description of Artificial Sequence: Synthetic peptide
FSDTDRS

SEQ ID NO: 400 - protein, 26 aa, synthetic construct
  REGION 1..26: note = Description of Artificial Sequence: Synthetic peptide
ARAQQGKRIYGIVSFGELFYYYYMDA

SEQ ID NO: 401 - protein, 6 aa, synthetic construct
  REGION 1..6: note = Description of Artificial Sequence: Synthetic peptide
SRGSRA

SEQ ID NO: 402 - protein, 26 aa, synthetic construct
  REGION 1..26: note = Description of Artificial Sequence: Synthetic peptide
ARAQQGKRIYGIVSFGEFFYYYYMDA

SEQ ID NO: 403 - protein, 8 aa, synthetic construct
  REGION 1..8: note = Description of Artificial Sequence: Synthetic peptide
GASINDAY

SEQ ID NO: 404 - protein, 7 aa, synthetic construct
  REGION 1..7: note = Description of Artificial Sequence: Synthetic peptide
VHHSGDT

SEQ ID NO: 405 - protein, 26 aa, synthetic construct
  REGION 1..26: note = Description of Artificial Sequence: Synthetic peptide
ARALHGKRIYGIVALGELFTYFYMDV

SEQ ID NO: 406 - protein, 6 aa, synthetic construct
  REGION 1..6: note = Description of Artificial Sequence: Synthetic peptide
SLGSRS

SEQ ID NO: 407 - protein, 8 aa, synthetic construct
  REGION 1..8: note = Description of Artificial Sequence: Synthetic peptide
GTLVRDNY

SEQ ID NO: 408 - protein, 7 aa, synthetic construct
  REGION 1..7: note = Description of Artificial Sequence: Synthetic peptide
VHDSGDT

SEQ ID NO: 409 - protein, 26 aa, synthetic construct
  REGION 1..26: note = Description of Artificial Sequence: Synthetic peptide
ATTKHGRRIYGVVAFKEWFTYFYMDV

SEQ ID NO: 410 - protein, 6 aa, synthetic construct
  REGION 1..6: note = Description of Artificial Sequence: Synthetic peptide
SIGSRA

SEQ ID NO: 411 - protein, 10 aa, synthetic construct
  REGION 1..10: note = Description of Artificial Sequence: Synthetic peptide
GESTGACTYF

SEQ ID NO: 412 - protein, 13 aa, synthetic construct
  REGION 1..13: note = Description of Artificial Sequence: Synthetic peptide
LSHCQSFWGSGWT

SEQ ID NO: 413 - protein, 21 aa, synthetic construct
  REGION 1..21: note = Description of Artificial Sequence: Synthetic peptide
ARFDGEVLVYNHWPKPAWVDL

SEQ ID NO: 414 - protein, 4 aa, synthetic construct
  REGION 1..4: note = Description of Artificial Sequence: Synthetic peptide
ATNF

SEQ ID NO: 415 - protein, 10 aa, synthetic construct
  REGION 1..10: note = Description of Artificial Sequence: Synthetic peptide
GDSTAACDYF

SEQ ID NO: 416 - protein, 13 aa, synthetic construct
  REGION 1..13: note = Description of Artificial Sequence: Synthetic peptide
LSHCAGYYNTGWT

SEQ ID NO: 417 - protein, 21 aa, synthetic construct
  REGION 1..21: note = Description of Artificial Sequence: Synthetic peptide
ARFDGEVLVYHDWPKPAWVDL

SEQ ID NO: 418 - protein, 4 aa, synthetic construct
  REGION 1..4: note = Description of Artificial Sequence: Synthetic peptide
SNRF

SEQ ID NO: 419 - protein, 13 aa, synthetic construct
  REGION 1..13: note = Description of Artificial Sequence: Synthetic peptide
LSHCAGYYNSGWT

SEQ ID NO: 420 - protein, 21 aa, synthetic construct
  REGION 1..21: note = Description of Artificial Sequence: Synthetic peptide
ARFGGDVLVYHDWPKPAWVDL

SEQ ID NO: 421 - protein, 4 aa, synthetic construct
  REGION 1..4: note = Description of Artificial Sequence: Synthetic peptide
INNF

SEQ ID NO: 422 - protein, 10 aa, synthetic construct
  REGION 1..10: note = Description of Artificial Sequence: Synthetic peptide
GDSTAACNSF

SEQ ID NO: 423 - protein, 13 aa, synthetic construct
  REGION 1..13: note = Description of Artificial Sequence: Synthetic peptide
LSHCASYWNRGWT

SEQ ID NO: 424 - protein, 21 aa, synthetic construct
  REGION 1..21: note = Description of Artificial Sequence: Synthetic peptide
ARFGGEVLRYTDWPKPAWVDL

SEQ ID NO: 425 - protein, 4 aa, synthetic construct
  REGION 1..4: note = Description of Artificial Sequence: Synthetic peptide
SNNF

SEQ ID NO: 426 - protein, 10 aa, synthetic construct
  REGION 1..10: note = Description of Artificial Sequence: Synthetic peptide
GDSTAGCDYF

SEQ ID NO: 427 - protein, 21 aa, synthetic construct
  REGION 1..21: note = Description of Artificial Sequence: Synthetic peptide
ARFDGEVLVYNDWPKPAWVDL

SEQ ID NO: 428 - protein, 10 aa, synthetic construct
  REGION 1..10: note = Description of Artificial Sequence: Synthetic peptide
GESINTGHYY

SEQ ID NO: 429 - protein, 7 aa, synthetic construct
  REGION 1..7: note = Description of Artificial Sequence: Synthetic peptide
IHYTTAV

SEQ ID NO: 430 - protein, 21 aa, synthetic construct
  REGION 1..21: note = Description of Artificial Sequence: Synthetic peptide
VRSGGDILYYYEWQKPHWFSP

SEQ ID NO: 431 - protein, 9 aa, synthetic construct
  REGION 1..9: note = Description of Artificial Sequence: Synthetic peptide
SSDIGGWNF

SEQ ID NO: 432 - protein, 15 aa, synthetic construct
  REGION 1..15: note = Description of Artificial Sequence: Synthetic peptide
GGSMRGTDWGENDFH

SEQ ID NO: 433 - protein, 8 aa, synthetic construct
  REGION 1..8: note = Description of Artificial Sequence: Synthetic peptide
IHWRGRTT

SEQ ID NO: 434 - protein, 20 aa, synthetic construct
  REGION 1..20: note = Description of Artificial Sequence: Synthetic peptide
ARHKYHDIFRVVPVAGWFDP

SEQ ID NO: 435 - protein, 6 aa, synthetic construct
  REGION 1..6: note = Description of Artificial Sequence: Synthetic peptide
QNVKNN

SEQ ID NO: 436 - protein, 15 aa, synthetic construct
  REGION 1..15: note = Description of Artificial Sequence: Synthetic peptide
GGSIRGGEWGDSDYH

SEQ ID NO: 437 - protein, 7 aa, synthetic construct
  REGION 1..7: note = Description of Artificial Sequence: Synthetic peptide
IHWRGTT

SEQ ID NO: 438 - protein, 20 aa, synthetic construct
  REGION 1..20: note = Description of Artificial Sequence: Synthetic peptide
VKHKYHDIVMVVPIAGWFDP

SEQ ID NO: 439 - protein, 6 aa, synthetic construct
  REGION 1..6: note = Description of Artificial Sequence: Synthetic peptide
QSVKNN

SEQ ID NO: 440 - protein, 15 aa, synthetic construct
  REGION 1..15: note = Description of Artificial Sequence: Synthetic peptide
GDSIRGGEWGDKDYH

SEQ ID NO: 441 - protein, 20 aa, synthetic construct
  REGION 1..20: note = Description of Artificial Sequence: Synthetic peptide
ARHRHHDVFMLVPIAGWFDV

SEQ ID NO: 442 - protein, 6 aa, synthetic construct
  REGION 1..6: note = Description of Artificial Sequence: Synthetic peptide
QNINKN

SEQ ID NO: 443 - protein, 9 aa, synthetic construct
  REGION 1..9: note = Description of Artificial Sequence: Synthetic peptide
QDSRPSDHS

SEQ ID NO: 444 - protein, 7 aa, synthetic construct
  REGION 1..7: note = Description of Artificial Sequence: Synthetic peptide
IHYNGAT

SEQ ID NO: 445 - protein, 21 aa, synthetic construct
  REGION 1..21: note = Description of Artificial Sequence: Synthetic peptide
NAIRIYGVVALGEWFHYGMDV

SEQ ID NO: 446 - protein, 6 aa, synthetic construct
  REGION 1..6: note = Description of Artificial Sequence: Synthetic peptide
PLTSRF

SEQ ID NO: 447 - protein, 8 aa, synthetic construct
  REGION 1..8: note = Description of Artificial Sequence: Synthetic peptide
GYNIRDYF

SEQ ID NO: 448 - protein, 8 aa, synthetic construct
  REGION 1..8: note = Description of Artificial Sequence: Synthetic peptide
INPKTGQP

SEQ ID NO: 449 - protein, 12 aa, synthetic construct
  REGION 1..12: note = Description of Artificial Sequence: Synthetic peptide
ARQRSDYWDFDV

SEQ ID NO: 450 - skipped

SEQ ID NO: 451 - protein, 8 aa, synthetic construct
  REGION 1..8: note = Description of Artificial Sequence: Synthetic peptide
GYKISDHF

SEQ ID NO: 452 - protein, 12 aa, synthetic construct
  REGION 1..12: note = Description of Artificial Sequence: Synthetic peptide
ARQRSDFWDFDV

SEQ ID NO: 453 - protein, 8 aa, synthetic construct
  REGION 1..8: note = Description of Artificial Sequence: Synthetic peptide
GYEFINCP

SEQ ID NO: 454 - protein, 8 aa, synthetic construct
  REGION 1..8: note = Description of Artificial Sequence: Synthetic peptide
MKPRGGAV

SEQ ID NO: 455 - protein, 18 aa, synthetic construct
  REGION 1..18: note = Description of Artificial Sequence: Synthetic peptide
TRGKYCTARDYYNWDFEH

SEQ ID NO: 456 - protein, 4 aa, synthetic construct
  REGION 1..4: note = Description of Artificial Sequence: Synthetic peptide
QYGS

SEQ ID NO: 457 - protein, 8 aa, synthetic construct
  REGION 1..8: note = Description of Artificial Sequence: Synthetic peptide
MKPRHGAV

SEQ ID NO: 458 - protein, 8 aa, synthetic construct
  REGION 1..8: note = Description of Artificial Sequence: Synthetic peptide
GYEFIDCT

SEQ ID NO: 459 - protein, 8 aa, synthetic construct
  REGION 1..8: note = Description of Artificial Sequence: Synthetic peptide
LKPRGGAV

SEQ ID NO: 460 - protein, 14 aa, synthetic construct
  REGION 1..14: note = Description of Artificial Sequence: Synthetic peptide
TRGKNCDYNWDFEH

SEQ ID NO: 461 - protein, 8 aa, synthetic construct
  REGION 1..8: note = Description of Artificial Sequence: Synthetic peptide
GYTFTAHI

SEQ ID NO: 462 - protein, 8 aa, synthetic construct
  REGION 1..8: note = Description of Artificial Sequence: Synthetic peptide
IKPQYGAV

SEQ ID NO: 463 - protein, 15 aa, synthetic construct
  REGION 1..15: note = Description of Artificial Sequence: Synthetic peptide
ARDRSYGDSSWALDA

SEQ ID NO: 464 - protein, 6 aa, synthetic construct
  REGION 1..6: note = Description of Artificial Sequence: Synthetic peptide
QGVGSD

SEQ ID NO: 465 - protein, 8 aa, synthetic construct
  REGION 1..8: note = Description of Artificial Sequence: Synthetic peptide
GFDFSRQG

SEQ ID NO: 466 - protein, 8 aa, synthetic construct
  REGION 1..8: note = Description of Artificial Sequence: Synthetic peptide
IKYDGSEK

SEQ ID NO: 467 - protein, 30 aa, synthetic construct
  REGION 1..30: note = Description of Artificial Sequence: Synthetic polypeptide
VREAGGPDYRNGYNYYDFYDGYYNYHYMDV

SEQ ID NO: 468 - protein, 9 aa, synthetic construct
  REGION 1..9: note = Description of Artificial Sequence: Synthetic peptide
SNDVGGYES

SEQ ID NO: 469 - protein, 8 aa, synthetic construct
  REGION 1..8: note = Description of Artificial Sequence: Synthetic peptide
GFTFHKYG

SEQ ID NO: 470 - protein, 8 aa, synthetic construct
  REGION 1..8: note = Description of Artificial Sequence: Synthetic peptide
ISDDGMRK

SEQ ID NO: 471 - protein, 30 aa, synthetic construct
  REGION 1..30: note = Description of Artificial Sequence: Synthetic polypeptide
AREAGGPIWHDDVKYYDFNDGYYNYHYMDV

SEQ ID NO: 472 - protein, 9 aa, synthetic construct
  REGION 1..9: note = Description of Artificial Sequence: Synthetic peptide
SSDVGGFDS

SEQ ID NO: 473 - protein, 8 aa, synthetic construct
  REGION 1..8: note = Description of Artificial Sequence: Synthetic peptide
GYSFIDYY

SEQ ID NO: 474 - protein, 8 aa, synthetic construct
  REGION 1..8: note = Description of Artificial Sequence: Synthetic peptide
IDPENGEA

SEQ ID NO: 475 - protein, 15 aa, synthetic construct
  REGION 1..15: note = Description of Artificial Sequence: Synthetic peptide
AAGAVGADSGSWFDP

SEQ ID NO: 476 - protein, 6 aa, synthetic construct
  REGION 1..6: note = Description of Artificial Sequence: Synthetic peptide
KLGDKY

SEQ ID NO: 477 - protein, 8 aa, synthetic construct
  REGION 1..8: note = Description of Artificial Sequence: Synthetic peptide
GGAFSSYA

SEQ ID NO: 478 - protein, 8 aa, synthetic construct
  REGION 1..8: note = Description of Artificial Sequence: Synthetic peptide
ITPVFGET

SEQ ID NO: 479 - protein, 17 aa, synthetic construct
  REGION 1..17: note = Description of Artificial Sequence: Synthetic peptide
TRDRRVVPMATDNWLDP

SEQ ID NO: 480 - protein, 6 aa, synthetic construct
  REGION 1..6: note = Description of Artificial Sequence: Synthetic peptide
QTIHTY

SEQ ID NO: 481 - protein, 8 aa, synthetic construct
  REGION 1..8: note = Description of Artificial Sequence: Synthetic peptide
GNSFSNHD

SEQ ID NO: 482 - protein, 8 aa, synthetic construct
  REGION 1..8: note = Description of Artificial Sequence: Synthetic peptide
MSHEGDKT

SEQ ID NO: 483 - protein, 33 aa, synthetic construct
  REGION 1..33: note = Description of Artificial Sequence: Synthetic polypeptide
LTGSKHRLRDYFLYNEYGPNYEEWGDYLATLDV

SEQ ID NO: 484 - protein, 11 aa, synthetic construct
  REGION 1..11: note = Description of Artificial Sequence: Synthetic peptide
HSLQHSTGANY

SEQ ID NO: 485 - protein, 8 aa, synthetic construct
  REGION 1..8: note = Description of Artificial Sequence: Synthetic peptide
GNTFSKYD

SEQ ID NO: 486 - protein, 8 aa, synthetic construct
  REGION 1..8: note = Description of Artificial Sequence: Synthetic peptide
ISHERDKT

SEQ ID NO: 487 - protein, 34 aa, synthetic construct
  REGION 1..34: note = Description of Artificial Sequence: Synthetic polypeptide
TRGSKHRLRDYVLYDDYGLINYQEWNDYLEFLDV

SEQ ID NO: 488 - protein, 11 aa, synthetic construct
  REGION 1..11: note = Description of Artificial Sequence: Synthetic peptide
QSLRHSNGANY

SEQ ID NO: 489 - protein, 8 aa, synthetic construct
  REGION 1..8: note = Description of Artificial Sequence: Synthetic peptide
GNTFRKYD

SEQ ID NO: 490 - protein, 34 aa, synthetic construct
  REGION 1..34: note = Description of Artificial Sequence: Synthetic polypeptide
TGGSKHRLRDYVLYDDYGLINQQEWNDYLEFLDV

SEQ ID NO: 491 - protein, 8 aa, synthetic construct
  REGION 1..8: note = Description of Artificial Sequence: Synthetic peptide
DFPFSKYP

SEQ ID NO: 492 - protein, 8 aa, synthetic construct
  REGION 1..8: note = Description of Artificial Sequence: Synthetic peptide
ISGDAWHV

SEQ ID NO: 493 - protein, 28 aa, synthetic construct
  REGION 1..28: note = Description of Artificial Sequence: Synthetic peptide
ARMFQESGPPRLDRWSGRNYYYYSGMDV

SEQ ID NO: 494 - protein, 11 aa, synthetic construct
  REGION 1..11: note = Description of Artificial Sequence: Synthetic peptide
ESLRQSNGKTS

SEQ ID NO: 495 - protein, 9 aa, synthetic construct
  REGION 1..9: note = Description of Artificial Sequence: Synthetic peptide
GVNTFGLYA

SEQ ID NO: 496 - protein, 6 aa, synthetic construct
  REGION 1..6: note = Description of Artificial Sequence: Synthetic peptide
IWRWKS

SEQ ID NO: 497 - protein, 22 aa, synthetic construct
  REGION 1..22: note = Description of Artificial Sequence: Synthetic peptide
TTTSTYDKWSGLHHDGVMAFSS

SEQ ID NO: 498 - protein, 7 aa, synthetic construct
  REGION 1..7: note = Description of Artificial Sequence: Synthetic peptide
QSITGNW

SEQ ID NO: 499 - protein, 10 aa, synthetic construct
  REGION 1..10: note = Description of Artificial Sequence: Synthetic peptide
VSGASISDSY

SEQ ID NO: 500 - protein, 16 aa, synthetic construct
  REGION 1..16: note = Description of Artificial Sequence: Synthetic peptide
VHKSGDTNYSPSLKSR

SEQ ID NO: 501 - protein, 23 aa, synthetic construct
  REGION 1..23: note = Description of Artificial Sequence: Synthetic peptide
TLHGRRIYGIVAFNEWFTYFYMD

SEQ ID NO: 502 - protein, 12 aa, synthetic construct
  REGION 1..12: note = Description of Artificial Sequence: Synthetic peptide
NNQDRPSGIPER

SEQ ID NO: 503 - protein, 16 aa, synthetic construct
  REGION 1..16: note = Description of Artificial Sequence: Synthetic peptide
VHKSGDTNYNPSLKSR

SEQ ID NO: 504 - protein, 12 aa, Homo sapiens
ESKYGPPCPPCP

SEQ ID NO: 505 - protein, 10 aa, synthetic construct
  REGION 1..10: note = Description of Artificial Sequence: Synthetic peptide
VSGDSMNNYY

SEQ ID NO: 506 - protein, 16 aa, synthetic construct
  REGION 1..16: note = Description of Artificial Sequence: Synthetic peptide
ISDRESATYNPSLNSR

SEQ ID NO: 507 - protein, 23 aa, synthetic construct
  REGION 1..23: note = Description of Artificial Sequence: Synthetic peptide
ARRGQRIYGVVSFGEFFYYYSMD

SEQ ID NO: 508 - protein, 10 aa, synthetic construct
  REGION 1..10: note = Description of Artificial Sequence: Synthetic peptide
VSGGSISNYY

SEQ ID NO: 509 - protein, 16 aa, synthetic construct
  REGION 1..16: note = Description of Artificial Sequence: Synthetic peptide
ISDRETTTYNPSLNSR

SEQ ID NO: 510 - protein, 23 aa, synthetic construct
  REGION 1..23: note = Description of Artificial Sequence: Synthetic peptide
ARRGQRIYGVVSFGEFFYYYYMD

SEQ ID NO: 511 - protein, 10 aa, synthetic construct
  REGION 1..10: note = Description of Artificial Sequence: Synthetic peptide
VSNGSVSGRF

SEQ ID NO: 512 - protein, 16 aa, synthetic construct
  REGION 1..16: note = Description of Artificial Sequence: Synthetic peptide
FSDTDRSEYNPSLRSR

SEQ ID NO: 513 - protein, 23 aa, synthetic construct
  REGION 1..23: note = Description of Artificial Sequence: Synthetic peptide
AQQGKRIYGIVSFGELFYYYYMD

SEQ ID NO: 514 - protein, 12 aa, synthetic construct
  REGION 1..12: note = Description of Artificial Sequence: Synthetic peptide
NNQDRPAGVSER

SEQ ID NO: 515 - protein, 23 aa, synthetic construct
  REGION 1..23: note = Description of Artificial Sequence: Synthetic peptide
AQQGKRIYGIVSFGEFFYYYYMD

SEQ ID NO: 516 - protein, 10 aa, synthetic construct
  REGION 1..10: note = Description of Artificial Sequence: Synthetic peptide
VSGTLVRDNY

SEQ ID NO: 517 - protein, 16 aa, synthetic construct
  REGION 1..16: note = Description of Artificial Sequence: Synthetic peptide
VHDSGDTNYNPSLKSR

SEQ ID NO: 518 - protein, 23 aa, synthetic construct
  REGION 1..23: note = Description of Artificial Sequence: Synthetic peptide
TKHGRRIYGVVAFKEWFTYFYMD

SEQ ID NO: 519 - protein, 12 aa, synthetic construct
  REGION 1..12: note = Description of Artificial Sequence: Synthetic peptide
NNNDRPSGIPDR

SEQ ID NO: 520 - protein, 10 aa, synthetic construct
  REGION 1..10: note = Description of Artificial Sequence: Synthetic peptide
VSGASINDAY

SEQ ID NO: 521 - protein, 16 aa, synthetic construct
  REGION 1..16: note = Description of Artificial Sequence: Synthetic peptide
VHHSGDTNYNPSLKRR

SEQ ID NO: 522 - protein, 23 aa, synthetic construct
  REGION 1..23: note = Description of Artificial Sequence: Synthetic peptide
ALHGKRIYGIVALGELFTYFYMD

SEQ ID NO: 523 - protein, 12 aa, synthetic construct
  REGION 1..12: note = Description of Artificial Sequence: Synthetic peptide
NNQDRPAGVPER

SEQ ID NO: 524 - protein, 12 aa, synthetic construct
  REGION 1..12: note = Description of Artificial Sequence: Synthetic peptide
VSGESTGACTYF

SEQ ID NO: 525 - protein, 22 aa, synthetic construct
  REGION 1..22: note = Description of Artificial Sequence: Synthetic peptide
LSHCQSFWGSGWTFHNPSLKSR

SEQ ID NO: 526 - protein, 18 aa, synthetic construct
  REGION 1..18: note = Description of Artificial Sequence: Synthetic peptide
FDGEVLVYNHWPKPAWVD

SEQ ID NO: 527 - protein, 12 aa, synthetic construct
  REGION 1..12: note = Description of Artificial Sequence: Synthetic peptide
GVDKRPPGVPDR

SEQ ID NO: 528 - protein, 12 aa, synthetic construct
  REGION 1..12: note = Description of Artificial Sequence: Synthetic peptide
VSGDSTAACDYF

SEQ ID NO: 529 - protein, 22 aa, synthetic construct
  REGION 1..22: note = Description of Artificial Sequence: Synthetic peptide
LSHCAGYYNTGWTYHNPSLKSR

SEQ ID NO: 530 - protein, 18 aa, synthetic construct
  REGION 1..18: note = Description of Artificial Sequence: Synthetic peptide
FDGEVLVYHDWPKPAWVD

SEQ ID NO: 531 - protein, 12 aa, synthetic construct
  REGION 1..12: note = Description of Artificial Sequence: Synthetic peptide
GVNKRPSGVPDR

SEQ ID NO: 532 - protein, 22 aa, synthetic construct
  REGION 1..22: note = Description of Artificial Sequence: Synthetic peptide
LSHCAGYYNSGWTYHNPSLKSR

SEQ ID NO: 533 - protein, 18 aa, synthetic construct
  REGION 1..18: note = Description of Artificial Sequence: Synthetic peptide
FGGDVLVYHDWPKPAWVD

SEQ ID NO: 534 - protein, 12 aa, synthetic construct
  REGION 1..12: note = Description of Artificial Sequence: Synthetic peptide
VSGDSTAACNSF

SEQ ID NO: 535 - protein, 22 aa, synthetic construct
  REGION 1..22: note = Description of Artificial Sequence: Synthetic peptide
LSHCASYWNRGWTYHNPSLKSR

SEQ ID NO: 536 - protein, 18 aa, synthetic construct
  REGION 1..18: note = Description of Artificial Sequence: Synthetic peptide
FGGEVLRYTDWPKPAWVD

SEQ ID NO: 537 - protein, 12 aa, synthetic construct
  REGION 1..12: note = Description of Artificial Sequence: Synthetic peptide
DVNKRPSGVPDR

SEQ ID NO: 538 - protein, 18 aa, synthetic construct
  REGION 1..18: note = Description of Artificial Sequence: Synthetic peptide
FDGEVLVYNDWPKPAWVD

SEQ ID NO: 539 - protein, 12 aa, synthetic construct
  REGION 1..12: note = Description of Artificial Sequence: Synthetic peptide
VSGESINTGHYY

SEQ ID NO: 540 - protein, 16 aa, synthetic construct
  REGION 1..16: note = Description of Artificial Sequence: Synthetic peptide
IHYTTAVLHNPSLKSR

SEQ ID NO: 541 - protein, 18 aa, synthetic construct
  REGION 1..18: note = Description of Artificial Sequence: Synthetic peptide
SGGDILYYYEWQKPHWFS

SEQ ID NO: 542 - protein, 12 aa, synthetic construct
  REGION 1..12: note = Description of Artificial Sequence: Synthetic peptide
EVNKRPSGVPGR

SEQ ID NO: 543 - protein, 17 aa, synthetic construct
  REGION 1..17: note = Description of Artificial Sequence: Synthetic peptide
VSGGSMRGTDWGENDFH

SEQ ID NO: 544 - protein, 17 aa, synthetic construct
  REGION 1..17: note = Description of Artificial Sequence: Synthetic peptide
IHWRGRTTHYKTSFRSR

SEQ ID NO: 545 - protein, 17 aa, synthetic construct
  REGION 1..17: note = Description of Artificial Sequence: Synthetic peptide
HKYHDIFRVVPVAGWFD

SEQ ID NO: 546 - protein, 8 aa, synthetic construct
  REGION 1..8: note = Description of Artificial Sequence: Synthetic peptide
ASQNVKNN

SEQ ID NO: 547 - protein, 12 aa, synthetic construct
  REGION 1..12: note = Description of Artificial Sequence: Synthetic peptide
DASSRAGGIPDR

SEQ ID NO: 548 - protein, 17 aa, synthetic construct
  REGION 1..17: note = Description of Artificial Sequence: Synthetic peptide
ASGGSIRGGEWGDSDYH

SEQ ID NO: 549 - protein, 16 aa, synthetic construct
  REGION 1..16: note = Description of Artificial Sequence: Synthetic peptide
IHWRGTTHYNAPFRGR

SEQ ID NO: 550 - protein, 17 aa, synthetic construct
  REGION 1..17: note = Description of Artificial Sequence: Synthetic peptide
HKYHDIVMVVPIAGWFD

SEQ ID NO: 551 - protein, 12 aa, synthetic construct
  REGION 1..12: note = Description of Artificial Sequence: Synthetic peptide
DTSSRASGIPAR

SEQ ID NO: 552 - protein, 17 aa, synthetic construct
  REGION 1..17: note = Description of Artificial Sequence: Synthetic peptide
VSGDSIRGGEWGDKDYH

SEQ ID NO: 553 - protein, 16 aa, synthetic construct
  REGION 1..16: note = Description of Artificial Sequence: Synthetic peptide
IHWRGTTHYKESLRRR

SEQ ID NO: 554 - protein, 17 aa, synthetic construct
  REGION 1..17: note = Description of Artificial Sequence: Synthetic peptide
HRHHDVFMLVPIAGWFD

SEQ ID NO: 555 - protein, 8 aa, synthetic construct
  REGION 1..8: note = Description of Artificial Sequence: Synthetic peptide
ASQNINKN

SEQ ID NO: 556 - protein, 12 aa, synthetic construct
  REGION 1..12: note = Description of Artificial Sequence: Synthetic peptide
ETYSKIAAFPAR

SEQ ID NO: 557 - protein, 11 aa, synthetic construct
  REGION 1..11: note = Description of Artificial Sequence: Synthetic peptide
VSQDSRPSDHS

SEQ ID NO: 558 - protein, 16 aa, synthetic construct
  REGION 1..16: note = Description of Artificial Sequence: Synthetic peptide
IHYNGATTYNPSLRSR

SEQ ID NO: 559 - protein, 20 aa, synthetic construct
  REGION 1..20: note = Description of Artificial Sequence: Synthetic peptide
NAIRIYGVVALGEWFHYGMD

SEQ ID NO: 560 - protein, 12 aa, synthetic construct
  REGION 1..12: note = Description of Artificial Sequence: Synthetic peptide
RSSQRSSGWSGR

SEQ ID NO: 561 - protein, 10 aa, synthetic construct
  REGION 1..10: note = Description of Artificial Sequence: Synthetic peptide
ASGYNIRDYF

SEQ ID NO: 562 - protein, 17 aa, synthetic construct
  REGION 1..17: note = Description of Artificial Sequence: Synthetic peptide
INPKTGQPNNPRQFQGR

SEQ ID NO: 563 - protein, 9 aa, synthetic construct
  REGION 1..9: note = Description of Artificial Sequence: Synthetic peptide
QRSDYWDFD

SEQ ID NO: 564 - protein, 4 aa, synthetic construct
  REGION 1..4: note = Description of Artificial Sequence: Synthetic peptide
ANGY

SEQ ID NO: 565 - protein, 13 aa, synthetic construct
  REGION 1..13: note = Description of Artificial Sequence: Synthetic peptide
DGSKLERGVPSRF

SEQ ID NO: 566 - protein, 10 aa, synthetic construct
  REGION 1..10: note = Description of Artificial Sequence: Synthetic peptide
ASGYKISDHF

SEQ ID NO: 567 - protein, 12 aa, synthetic construct
  REGION 1..12: note = Description of Artificial Sequence: Synthetic peptide
DGSKLERGVPAR

SEQ ID NO: 568 - protein, 10 aa, synthetic construct
  REGION 1..10: note = Description of Artificial Sequence: Synthetic peptide
ASGYEFINCP

SEQ ID NO: 569 - protein, 17 aa, synthetic construct
  REGION 1..17: note = Description of Artificial Sequence: Synthetic peptide
MKPRGGAVSYARQLQGR

SEQ ID NO: 570 - protein, 15 aa, synthetic construct
  REGION 1..15: note = Description of Artificial Sequence: Synthetic peptide
GKYCTARDYYNWDFE

SEQ ID NO: 571 - protein, 6 aa, synthetic construct
  REGION 1..6: note = Description of Artificial Sequence: Synthetic peptide
TSQYGS

SEQ ID NO: 572 - protein, 12 aa, synthetic construct
  REGION 1..12: note = Description of Artificial Sequence: Synthetic peptide
SGSTRAAGIPDR

SEQ ID NO: 573 - protein, 17 aa, synthetic construct
  REGION 1..17: note = Description of Artificial Sequence: Synthetic peptide
MKPRHGAVSYARQLQGR

SEQ ID NO: 574 - protein, 10 aa, synthetic construct
  REGION 1..10: note = Description of Artificial Sequence: Synthetic peptide
ASGYEFIDCT

SEQ ID NO: 575 - protein, 17 aa, synthetic construct
  REGION 1..17: note = Description of Artificial Sequence: Synthetic peptide
LKPRGGAVNYARPLQGR

SEQ ID NO: 576 - protein, 11 aa, synthetic construct
  REGION 1..11: note = Description of Artificial Sequence: Synthetic peptide
GKNCDYNWDFE

SEQ ID NO: 577 - protein, 10 aa, synthetic construct
  REGION 1..10: note = Description of Artificial Sequence: Synthetic peptide
TSGYTFTAHI

SEQ ID NO: 578 - protein, 17 aa, synthetic construct
  REGION 1..17: note = Description of Artificial Sequence: Synthetic peptide
IKPQYGAVNFGGGFRDR

SEQ ID NO: 579 - protein, 12 aa, synthetic construct
  REGION 1..12: note = Description of Artificial Sequence: Synthetic peptide
DRSYGDSSWALD

SEQ ID NO: 580 - protein, 8 aa, synthetic construct
  REGION 1..8: note = Description of Artificial Sequence: Synthetic peptide
TSQGVGSD

SEQ ID NO: 581 - protein, 12 aa, synthetic construct
  REGION 1..12: note = Description of Artificial Sequence: Synthetic peptide
HTSSVEDGVPSR

SEQ ID NO: 582 - protein, 10 aa, synthetic construct
  REGION 1..10: note = Description of Artificial Sequence: Synthetic peptide
ASGFDFSRQG

SEQ ID NO: 583 - protein, 17 aa, synthetic construct
  REGION 1..17: note = Description of Artificial Sequence: Synthetic peptide
IKYDGSEKYHADSVWGR

SEQ ID NO: 584 - protein, 27 aa, synthetic construct
  REGION 1..27: note = Description of Artificial Sequence: Synthetic peptide
EAGGPDYRNGYNYYDFYDGYYNYHYMD

SEQ ID NO: 585 - protein, 12 aa, synthetic construct
  REGION 1..12: note = Description of Artificial Sequence: Synthetic peptide
DVSKRPSGVSNR

SEQ ID NO: 586 - protein, 10 aa, synthetic construct
  REGION 1..10: note = Description of Artificial Sequence: Synthetic peptide
ASGFTFHKYG

SEQ ID NO: 587 - protein, 17 aa, synthetic construct
  REGION 1..17: note = Description of Artificial Sequence: Synthetic peptide
ISDDGMRKYHSDSMWGR

SEQ ID NO: 588 - protein, 27 aa, synthetic construct
  REGION 1..27: note = Description of Artificial Sequence: Synthetic peptide
EAGGPIWHDDVKYYDFNDGYYNYHYMD

SEQ ID NO: 589 - protein, 12 aa, synthetic construct
  REGION 1..12: note = Description of Artificial Sequence: Synthetic peptide
DVSHRPSGISNR

SEQ ID NO: 590 - protein, 10 aa, synthetic construct
  REGION 1..10: note = Description of Artificial Sequence: Synthetic peptide
VSGYSFIDYY

SEQ ID NO: 591 - protein, 17 aa, synthetic construct
  REGION 1..17: note = Description of Artificial Sequence: Synthetic peptide
IDPENGEARYAEKFQGR

SEQ ID NO: 592 - protein, 12 aa, synthetic construct
  REGION 1..12: note = Description of Artificial Sequence: Synthetic peptide
GAVGADSGSWFD

SEQ ID NO: 593 - protein, 12 aa, synthetic construct
  REGION 1..12: note = Description of Artificial Sequence: Synthetic peptide
ENDRRPSGIPER

SEQ ID NO: 594 - protein, 10 aa, synthetic construct
  REGION 1..10: note = Description of Artificial Sequence: Synthetic peptide
ASGGAFSSYA

SEQ ID NO: 595 - protein, 17 aa, synthetic construct
  REGION 1..17: note = Description of Artificial Sequence: Synthetic peptide
ITPVFGETKYAPRFQGR

SEQ ID NO: 596 - protein, 14 aa, synthetic construct
  REGION 1..14: note = Description of Artificial Sequence: Synthetic peptide
DRRVVPMATDNWLD

SEQ ID NO: 597 - protein, 8 aa, synthetic construct
  REGION 1..8: note = Description of Artificial Sequence: Synthetic peptide
ASQTIHTY

SEQ ID NO: 598 - protein, 12 aa, synthetic construct
  REGION 1..12: note = Description of Artificial Sequence: Synthetic peptide
GASTLQSGVPSR

SEQ ID NO: 599 - protein, 10 aa, synthetic construct
  REGION 1..10: note = Description of Artificial Sequence: Synthetic peptide
ASGNSFSNHD

SEQ ID NO: 600 - protein, 17 aa, synthetic construct
  REGION 1..17: note = Description of Artificial Sequence: Synthetic peptide
MSHEGDKTGLAQKFQGR

SEQ ID NO: 601 - protein, 30 aa, synthetic construct
  REGION 1..30: note = Description of Artificial Sequence: Synthetic polypeptide
GSKHRLRDYFLYNEYGPNYEEWGDYLATLD

SEQ ID NO: 602 - protein, 13 aa, synthetic construct
  REGION 1..13: note = Description of Artificial Sequence: Synthetic peptide
CSHSLQHSTGANY

SEQ ID NO: 603 - protein, 12 aa, synthetic construct
  REGION 1..12: note = Description of Artificial Sequence: Synthetic peptide
LATHRASGVPDR

SEQ ID NO: 604 - protein, 10 aa, synthetic construct
  REGION 1..10: note = Description of Artificial Sequence: Synthetic peptide
ASGNTFSKYD

SEQ ID NO: 605 - protein, 17 aa, synthetic construct
  REGION 1..17: note = Description of Artificial Sequence: Synthetic peptide
ISHERDKTESAQRFKGR

SEQ ID NO: 606 - protein, 31 aa, synthetic construct
  REGION 1..31: note = Description of Artificial Sequence: Synthetic polypeptide
GSKHRLRDYVLYDDYGLINYQEWNDYLEFLD

SEQ ID NO: 607 - protein, 13 aa, synthetic construct
  REGION 1..13: note = Description of Artificial Sequence: Synthetic peptide
STQSLRHSNGANY

SEQ ID NO: 608 - protein, 12 aa, synthetic construct
  REGION 1..12: note = Description of Artificial Sequence: Synthetic peptide
LGSQRASGVPDR

SEQ ID NO: 609 - protein, 17 aa, synthetic construct
  REGION 1..17: note = Description of Artificial Sequence: Synthetic peptide
MSHEGDKTESAQRFKGR

SEQ ID NO: 610 - protein, 10 aa, synthetic construct
  REGION 1..10: note = Description of Artificial Sequence: Synthetic peptide
ASGNTFRKYD

SEQ ID NO: 611 - protein, 31 aa, synthetic construct
  REGION 1..31: note = Description of Artificial Sequence: Synthetic polypeptide
GSKHRLRDYVLYDDYGLINQQEWNDYLEFLD

SEQ ID NO: 612 - protein, 10 aa, synthetic construct
  REGION 1..10: note = Description of Artificial Sequence: Synthetic peptide
VSDFPFSKYP

SEQ ID NO: 613 - protein, 17 aa, synthetic construct
  REGION 1..17: note = Description of Artificial Sequence: Synthetic peptide
ISGDAWHVVYSNSVQGR

SEQ ID NO: 614 - protein, 25 aa, synthetic construct
  REGION 1..25: note = Description of Artificial Sequence: Synthetic peptide
MFQESGPPRLDRWSGRNYYYYSGMD

SEQ ID NO: 615 - protein, 13 aa, synthetic construct
  REGION 1..13: note = Description of Artificial Sequence: Synthetic peptide
SSESLRQSNGKTS

SEQ ID NO: 616 - protein, 12 aa, synthetic construct
  REGION 1..12: note = Description of Artificial Sequence: Synthetic peptide
EVSNRFSGVSDR

SEQ ID NO: 617 - protein, 11 aa, synthetic construct
  REGION 1..11: note = Description of Artificial Sequence: Synthetic peptide
AYGVNTFGLYA

SEQ ID NO: 618 - protein, 15 aa, synthetic construct
  REGION 1..15: note = Description of Artificial Sequence: Synthetic peptide
IWRWKSSASHHFRGR

SEQ ID NO: 619 - protein, 19 aa, synthetic construct
  REGION 1..19: note = Description of Artificial Sequence: Synthetic peptide
TSTYDKWSGLHHDGVMAFS

SEQ ID NO: 620 - protein, 9 aa, synthetic construct
  REGION 1..9: note = Description of Artificial Sequence: Synthetic peptide
ASQSITGNW

SEQ ID NO: 621 - protein, 12 aa, synthetic construct
  REGION 1..12: note = Description of Artificial Sequence: Synthetic peptide
RGAALLGGVPSR

SEQ ID NO: 622 - protein, 132 aa, synthetic construct
  REGION 1..132: note = Description of Artificial Sequence: Synthetic polypeptide
QMQLQESGPGLVKPSETLSLTCSVSGASISDSYWSWIRRSPGKGLEWIGYVHKSGDTNYSPSLKSRVNLSLDTSKNQVSLSLVAATAADSGKYYCARTLHGRRIYGIVAFNEWFTYFYMDVWGNGTQVTVSS

SEQ ID NO: 623 - protein, 105 aa, synthetic construct
  REGION 1..105: note = Description of Artificial Sequence: Synthetic polypeptide
SDISVAPGETARISCGEKSLGSRAVQWYQHRAGQAPSLIIYNNQDRPSGIPERFSGSPDSPFGTTATLTITSVEAGDEADYYCHIWDSRVPTKWVFGGGTTLTVL

SEQ ID NO: 624 - protein, 132 aa, synthetic construct
  REGION 1..132: note = Description of Artificial Sequence: Synthetic polypeptide
QMQLQESGPGLVKPSETLSLTCSVSGASISDSYWSWIRRSPGKGLEWIGYVHKSGDTNYNPSLKSRVHLSLDTSKNQVSLSLTGVTAADSGKYYCARTLHGRRIYGIVAFNEWFTYFYMDVWGTGTQVTVSS

SEQ ID NO: 625 - protein, 105 aa, synthetic construct
  REGION 1..105: note = Description of Artificial Sequence: Synthetic polypeptide
SDISVAPGETARISCGEKSLGSRAVQWYQHRAGQAPSLIIYNNQDRPSGIPERFSGSPDSRPGTTATLTITSVEAGDEADYYCHIWDSRVPTKWVFGGGTTLTVL

SEQ ID NO: 626 - protein, 105 aa, synthetic construct
  REGION 1..105: note = Description of Artificial Sequence: Synthetic polypeptide
SDISVAPGETARISCGEKSLGSRAVQWYQHRAGQAPSLIIYNNQDRPSGIPERFSGSPDFRPGTTATLTITSVEAGDEADYYCHIWDSRVPTKWVFGGGTTLTVL

SEQ ID NO: 627 - protein, 132 aa, synthetic construct
  REGION 1..132: note = Description of Artificial Sequence: Synthetic polypeptide
QMQLQESGPGLVKPSETLSLTCSVSGASISDSYWSWIRQPPGKGLEWIGYVHKSGDTNYSPSLKSRVNLSLDTSKNQVSLSLSAATAADSGVYYCARTLHGRRIYGIVAFNEWFTYFYMDVWGNGTQVTVSS

SEQ ID NO: 628 - protein, 105 aa, synthetic construct
  REGION 1..105: note = Description of Artificial Sequence: Synthetic polypeptide
SDISVAPGETARISCGEKSLGSRAVQWYQQRAGQAPSLIIYNNQDRPSGIPERFSGSPDSGFGTTATLTITSVEAGDEADYYCHIWDSRVPTKWVFGGGTTLTVL

SEQ ID NO: 629 - protein, 132 aa, synthetic construct
  REGION 1..132: note = Description of Artificial Sequence: Synthetic polypeptide
QVQLQESGPGLVKPSETLSVTCSVSGDSMNNYYWTWIRQSPGKGLEWIGYISDRESATYNPSLNSRVVISRDTSKNQLSLKLNSVTPADTAVYYCATARRGQRIYGVVSFGEFFYYYSMDVWGKGTTVTVSS

SEQ ID NO: 630 - protein, 108 aa, synthetic construct
  REGION 1..108: note = Description of Artificial Sequence: Synthetic polypeptide
SYVRPLSVALGETARISCGRQALGSRAVQWYQHRPGQAPILLIYNNQDRPSGIPERFSGTPDINFGTRATLTISGVEAGDEADYYCHMWDSRSGFSWSFGGATRLTVL

SEQ ID NO: 631 - protein, 132 aa, synthetic construct
  REGION 1..132: note = Description of Artificial Sequence: Synthetic polypeptide
QVQLQESGPGLVKPSETLSVTCSVSGDSMNNYYWTWIRQSPGKGLEWIGYISDRESATYNPSLNSRVTISRDTSKNQFSLKLNSVTPADTAVYYCARARRGQRIYGVVSFGEFFYYYSMDVWGKGTTVTVSS

SEQ ID NO: 632 - protein, 108 aa, synthetic construct
  REGION 1..108: note = Description of Artificial Sequence: Synthetic polypeptide
SPVRPLSVALGETARISCGRQALGSRAVQWYQHRPGQAPILLIYNNQDRPSGIPERFSGTPDINFGTRATLTISGVEAGDEADYYCHMWDSRSGFSWSFGGATRLTVL

SEQ ID NO: 633 - protein, 132 aa, synthetic construct
  REGION 1..132: note = Description of Artificial Sequence: Synthetic polypeptide
QVQLQESGPGLVRPSETLSVTCIVSGGSISNYYWTWIRQSPGKGLEWIGYISDRETTTYNPSLNSRAVISRDTSKNQLSLQLRSVTTADTAIYFCATARRGQRIYGVVSFGEFFYYYYMDVWGKGTAVTVSS

SEQ ID NO: 634 - protein, 111 aa, synthetic construct
  REGION 1..111: note = Description of Artificial Sequence: Synthetic polypeptide
SVTSYVSPLSVALGETARISCGRQALGSRAVQWYQHKPGQAPILLIYNNQDRPSGIPERFSGTPDINFGTTATLTISGVEVGDEADYYCHMWDSRSGFSWSFGGATRLTVL

SEQ ID NO: 635 - protein, 132 aa, synthetic construct
  REGION 1..132: note = Description of Artificial Sequence: Synthetic polypeptide
QVHLQESGPGLVTPSETLSLTCTVSNGSVSGRFWSWIRQSPGRGLEWIGYFSDTDRSEYNPSLRSRLTLSVDRSKNQLSLKLKSVTAADSATYYCARAQQGKRIYGIVSFGELFYYYYMDAWGKGTPVTVSS

SEQ ID NO: 636 - protein, 107 aa, synthetic construct
  REGION 1..107: note = Description of Artificial Sequence: Synthetic polypeptide
SLNPLSLAPGATAKIPCGERSRGSRAVQWYQQKPGQAPTLIIYNNQDRPAGVSERFSGNPDVAIGVTATLTISRVEVGDEGDYYCHYWDSRSPISWIFAGGTQLTVL

SEQ ID NO: 637 - protein, 132 aa, synthetic construct
  REGION 1..132: note = Description of Artificial Sequence: Synthetic polypeptide
QVHLQESGPGLVTPSETLSLTCTVSNGSVSGRFWSWIRQSPGRGLEWIGYFSDTDRSEYNPSLRSRLTLSVDRSKNQLSLRLKSVTAADSATYYCARAQQGKRIYGIVSFGEFFYYYYMDAWGKGTPVTVSS

SEQ ID NO: 638 - protein, 107 aa, synthetic construct
  REGION 1..107: note = Description of Artificial Sequence: Synthetic polypeptide
SLNPLSLAPGATAKIPCGERSRGSRAVQWYQQKPGQAPTLIIYNNQDRPAGVSERFSGNPDVAIGVTATLTISRVEVGDEADYYCHYWDSRSPISWIFGGGTQLTVL

SEQ ID NO: 639 - protein, 132 aa, synthetic construct
  REGION 1..132: note = Description of Artificial Sequence: Synthetic polypeptide
QVHLQESGPGLVKPSETLSLTCNVSGTLVRDNYWSWIRQPLGKQPEWIGYVHDSGDTNYNPSLKSRVHLSLDKSKNLVSLRLTGVTAADSAIYYCATTKHGRRIYGVVAFKEWFTYFYMDVWGKGTSVTVSS

SEQ ID NO: 640 - protein, 105 aa, synthetic construct
  REGION 1..105: note = Description of Artificial Sequence: Synthetic polypeptide
TFVSVAPGQTARITCGEESLGSRSVIWYQQRPGQAPSLIIYNNNDRPSGIPDRFSGSPGSTFGTTATLTITSVEAGDEADYYCHIWDSRRPTNWVFGEGTTLIVL

SEQ ID NO: 641 - protein, 132 aa, synthetic construct
  REGION 1..132: note = Description of Artificial Sequence: Synthetic polypeptide
QLHLQESGPGLVKPPETLSLTCSVSGASINDAYWSWIRQSPGKRPEWVGYVHHSGDTNYNPSLKRRVTFSLDTAKNEVSLKLVDLTAADSATYFCARALHGKRIYGIVALGELFTYFYMDVWGKGTAVTVSS

SEQ ID NO: 642 - protein, 105 aa, synthetic construct
  REGION 1..105: note = Description of Artificial Sequence: Synthetic polypeptide
SSMSVSPGETAKISCGKESIGSRAVQWYQQKPGQPPSLIIYNNQDRPAGVPERFSASPDFRPGTTATLTITNVDAEDEADYYCHIYDARGGTNWVFDRGTTLTVL

SEQ ID NO: 643 - protein, 135 aa, synthetic construct
  REGION 1..135: note = Description of Artificial Sequence: Synthetic polypeptide
QSQLQESGPRLVEASETLSLTCNVSGESTGACTYFWGWVRQAPGKGLEWIGSLSHCQSFWGSGWTFHNPSLKSRLTISLDTPKNQVFLKLTSLTAADTATYYCARFDGEVLVYNHWPKPAWVDLWGRGIPVTVSS

SEQ ID NO: 644 - protein, 105 aa, synthetic construct
  REGION 1..105: note = Description of Artificial Sequence: Synthetic polypeptide
QSALTQPPSASGSPGQSITISCNGTATNFVSWYQQFPDKAPKLIIFGVDKRPPGVPDRFSGSRSGTTASLTVSRLQTDDEAVYYCGSLVGNWDVIFGGGTTLTVL

SEQ ID NO: 645 - protein, 135 aa, synthetic construct
  REGION 1..135: note = Description of Artificial Sequence: Synthetic polypeptide
QPQLQESGPGLVEASETLSLTCTVSGDSTAACDYFWGWVRQPPGKGLEWIGGLSHCAGYYNTGWTYHNPSLKSRLTISLDTPKNQVFLKLNSVTAADTAIYYCARFDGEVLVYHDWPKPAWVDLWGRGTLVTVSS

SEQ ID NO: 646 - protein, 105 aa, synthetic construct
  REGION 1..105: note = Description of Artificial Sequence: Synthetic polypeptide
QSALTQPPSASGSPGQSISISCTGTSNRFVSWYQQHPGKAPKLVIYGVNKRPSGVPDRFSGSKSGNTASLTVSGLQTDDEAVYYCSSLVGNWDVIFGGGTKLTVL

SEQ ID NO: 647 - protein, 135 aa, synthetic construct
  REGION 1..135: note = Description of Artificial Sequence: Synthetic polypeptide
QPQLQESGPGLVEASETLSLTCTVSGDSTAACDYFWGWVRQPPGKGLEWIGSLSHCAGYYNSGWTYHNPSLKSRLTISLDTPKNQVFLKLNSVTAADTAIYYCARFGGDVLVYHDWPKPAWVDLWGRGVLVTVSS

SEQ ID NO: 648 - protein, 105 aa, synthetic construct
  REGION 1..105: note = Description of Artificial Sequence: Synthetic polypeptide
QSALTQPPSASGSPGQSITISCTGNINNFVSWYQQHPGKAPKLVIYGVNKRPSGVPDRFSGSKSGNAASLTVSGLQTDDEAVYYCGSLAGNWDVVFGGGTKLTVL

SEQ ID NO: 649 - protein, 135 aa, synthetic construct
  REGION 1..135: note = Description of Artificial Sequence: Synthetic polypeptide
QPQLQESGPTLVEASETLSLTCAVSGDSTAACNSFWGWVRQPPGKGLEWVGSLSHCASYWNRGWTYHNPSLKSRLTLALDTPKNLVFLKLNSVTAADTATYYCARFGGEVLRYTDWPKPAWVDLWGRGTLVTVSS

SEQ ID NO: 650 - protein, 105 aa, synthetic construct
  REGION 1..105: note = Description of Artificial Sequence: Synthetic polypeptide
QSALTQPPSASGSPGQSITISCTGTSNNFVSWYQQHAGKAPKLVIYDVNKRPSGVPDRFSGSKSGNTASLTVSGLQTDDEAVYYCGSLVGNWDVIFGGGTKLTVL

SEQ ID NO: 651 - protein, 135 aa, synthetic construct
  REGION 1..135: note = Description of Artificial Sequence: Synthetic polypeptide
QPQLQESGPGLVEASETLSLTCTVSGDSTAGCDYFWGWVRQPPGKGLEWIGGLSHCAGYYNTGWTYHNPSLKSRLTISLDTPKNQVFLKLNSVTAADTAIYYCARFDGEVLVYNDWPKPAWVDLWGRGTLVTVSS

SEQ ID NO: 652 - protein, 105 aa, synthetic construct
  REGION 1..105: note = Description of Artificial Sequence: Synthetic polypeptide
QSALTQPPSASGSPGQSITISCTGTSNNFVSWYQQHPAKAPKLVIYGVNKRPSGVPDRFSGSKSGNTASLTVSGLQTDDEAVYYCGSLVGNWDVIFGGGTKLTVL

SEQ ID NO: 653 - protein, 129 aa, synthetic construct
  REGION 1..129: note = Description of Artificial Sequence: Synthetic polypeptide
QVQLQESGPGLVKPAETLSLTCSVSGESINTGHYYWGWVRQVPGKGLEWIGHIHYTTAVLHNPSLKSRLTIKIYTLRNQITLRLSNVTAADTAVYHCVRSGGDILYYYEWQKPHWFSPWGPGIHVTVSS

SEQ ID NO: 654 - protein, 110 aa, synthetic construct
  REGION 1..110: note = Description of Artificial Sequence: Synthetic polypeptide
QSALTQPPSASGSLGQSVTISCNGTSSDIGGWNFVSWYQQFPGRAPRLIIFEVNKRPSGVPGRFSGSKSGNSASLTVSGLQSDDEGQYFCSSLFGRWDVVFGGGTKLTVL

SEQ ID NO: 655 - protein, 134 aa, synthetic construct
  REGION 1..134: note = Description of Artificial Sequence: Synthetic polypeptide
QLQLQESGPGLVKPSETLSLTCTVSGGSMRGTDWGENDFHYGWIRQSSAKGLEWIGSIHWRGRTTHYKTSFRSRATLSIDTSNNRFSLTFSFVTAADTAVYYCARHKYHDIFRVVPVAGWFDPWGQGLLVTVSS

SEQ ID NO: 656 - protein, 107 aa, synthetic construct
  REGION 1..107: note = Description of Artificial Sequence: Synthetic polypeptide
EIVMTQSPPTLSVSPGETATLSCRASQNVKNNLAWYQLKPGQAPRLLIFDASSRAGGIPDRFSGSGYGTDFTLTVNSVQSEDFGDYFCQQYEEWPRTFGQGTKVDIK

SEQ ID NO: 657 - protein, 133 aa, synthetic construct
  REGION 1..133: note = Description of Artificial Sequence: Synthetic polypeptide
EVHLEESGPGLVRPSETLSLTCTASGGSIRGGEWGDSDYHWGWVRHSPEKGLEWIGSIHWRGTTHYNAPFRGRGRLSIDLSRNQFSLRLTSVTAEDTAVYYCVKHKYHDIVMVVPIAGWFDPWGQGLQVTVSS

SEQ ID NO: 658 - protein, 107 aa, synthetic construct
  REGION 1..107: note = Description of Artificial Sequence: Synthetic polypeptide
EIMMTQSPAILSVSPGDRATLSCRASQSVKNNLAWYQKRPGQAPRLLIFDTSSRASGIPARFSGGGSGTEFTLTVNSMQSEDFATYYCQQYEEWPRTFGQGTKVEIK

SEQ ID NO: 659 - protein, 133 aa, synthetic construct [sequence omitted]

SEQ ID NO: 660 - protein, 107 aa, synthetic construct
  REGION 1..107: note = Description of Artificial Sequence: Synthetic polypeptide
EIVMTQSPDTLSVSPGETVTLSCRASQNINKNLAWYQYKPGQSPRLVIFETYSKIAAFPARFVASGSGTEFTLTINNMQSEDVAVYYCQQYEEWPRTFGQGTKVDIK

SEQ ID NO: 661 - protein, 130 aa, synthetic construct
  REGION 1..130: note = Description of Artificial Sequence: Synthetic polypeptide
QVQLRESGPGLVKPSETLSLSCTVSQDSRPSDHSWTWVRQSPGKALEWIGDIHYNGATTYNPSLRSRVRIELDQSIPRFSLKMTSMTAADTGMYYCARNAIRIYGVVALGEWFHYGMDVWGQGTAVTVSS

SEQ ID NO: 662 - protein, 110 aa, synthetic construct
  REGION 1..110: note = Description of Artificial Sequence: Synthetic polypeptide
WASSELTQPPSVSVSPGQTARITCSGAPLTSRFTYWYRQKPGQAPVLIISRSSQRSSGWSGRFSASWSGTTVTLTIRGVQADDEADYYCQSSDTSDSYKMFGGGTKLTVL

SEQ ID NO: 663 - protein, 123 aa, synthetic construct
  REGION 1..123: note = Description of Artificial Sequence: Synthetic polypeptide
QVQLLQSGAAVTKPGASVRVSCEASGYNIRDYFIHWWRQAPGQGLQWVGWINPKTGQPNNPRQFQGRVSLTRHASWDFDTFSFYMDLKALRSDDTAVYFCARQRSDYWDFDVWGSGTQVTVSS

SEQ ID NO: 664 - protein, 99 aa, synthetic construct
  REGION 1..99: note = Description of Artificial Sequence: Synthetic polypeptide
DIQMTQSPSSLSASVGDTVTITCQANGYLNWYQQRRGKAPKLLIYDGSKLERGVPSRFSGRRWGQEYNLTINNLQPEDIATYFCQVYEFVVPGTRLDLK

SEQ ID NO: 665 - protein, 123 aa, synthetic construct
  REGION 1..123: note = Description of Artificial Sequence: Synthetic polypeptide
QVQLLQSGAAVTKPGASVRVSCEASGYNIRDYFIHWWRQAPGQGLQWVGWINPKTGQPNNPRQFQGRVSLTRHASFDFDTFSFYMDLKALRSDDTAVYFCARQRSDYWDFDVWGSGTQVTVSS

SEQ ID NO: 666 - protein, 99 aa, synthetic construct
  REGION 1..99: note = Description of Artificial Sequence: Synthetic polypeptide
DIQMTQSPSSLSASVGDTATITCQANGYLNWYQQRRGKAPKLLIYDGSKLERGVPSRFSGRRWGQEYNLTINNLQPEDIATYFCQVYEFVVPGTRLDLK

SEQ ID NO: 667 - protein, 123 aa, synthetic construct
  REGION 1..123: note = Description of Artificial Sequence: Synthetic polypeptide
QVHLSQSGAAVTKPGASVRVSCEASGYKISDHFIHWWRQAPGQGLQWVGWINPKTGQPNNPRQFQGRVSLTRQASWDFDTYSFYMDLKAVRSDDTAIYFCARQRSDFWDFDVWGSGTQVTVSS

SEQ ID NO: 668 - protein, 99 aa, synthetic construct
  REGION 1..99: note = Description of Artificial Sequence: Synthetic polypeptide
DIQMTQSPSSLSARVGDTVTITCQANGYLNWYQQRRGKAPKLLIYDGSKLERGVPARFSGRRWGQEYNLTINNLQPEDVATYFCQVYEFIVPGTRLDLK

SEQ ID NO: 669 - protein, 125 aa, synthetic construct
  REGION 1..125: note = Description of Artificial Sequence: Synthetic polypeptide
QVRLSQSGGQMKKPGDSMRISCRASGYEFINCPINWIRLAPGKRPEWMGWMKPRGGAVSYARQLQGRVTMTRDMYSETAFLELRSLTSDDTAVYFCTRGKYCTARDYYNWDFEHWGQGTPVTVSS

SEQ ID NO: 670 - protein, 103 aa, synthetic construct
  REGION 1..103: note = Description of Artificial Sequence: Synthetic polypeptide
EIVLTQSPGTLSLSPGETAIISCRTSQYGSLAWYQQRPGQAPRLVIYSGSTRAAGIPDRFSGSRWGPDYNLTISNLESGDFGVYYCQQYEFFGQGTKVQVDIK

SEQ ID NO: 671 - protein, 125 aa, synthetic construct
  REGION 1..125: note = Description of Artificial Sequence: Synthetic polypeptide
QVRLSQSGGQMKKPGDSMRISCRASGYEFINCPINWIRLAPGKRPEWMGWMKPRHGAVSYARQLQGRVTMTRDMYSETAFLELRSLTSDDTAVYFCTRGKYCTARDYYNWDFEHWGQGTPVTVSS

SEQ ID NO: 672 - protein, 101 aa, synthetic construct
  REGION 1..101: note = Description of Artificial Sequence: Synthetic polypeptide
SLTQSPGTLSLSPGETAIISCRTSQYGSLAWYQQRPGQAPRLVIYSGSTRAAGIPDRFSGSRWGPDYNLTISNLESGDFGVYYCQQYEFFGQGTKVQVDIK

SEQ ID NO: 673 - protein, 121 aa, synthetic construct
  REGION 1..121: note = Description of Artificial Sequence: Synthetic polypeptide
QVQLVQSGGQMKKPGESMRISCRASGYEFIDCTLNWIRLAPGKRPEWMGWLKPRGGAVNYARPLQGRVTMTRDVYSDTAFLELRSLTVDDTAVYFCTRGKNCDYNWDFEHWGRGTPVIVSS

SEQ ID NO: 674 - protein, 122 aa, synthetic construct [sequence omitted]

SEQ ID NO: 675 - protein, 103 aa, synthetic construct [sequence omitted]

SEQ ID NO: 676 - protein, 137 aa, synthetic construct
  REGION 1..137: note = Description of Artificial Sequence: Synthetic polypeptide
CQRLVESGGGVVQPGSSLRLSCAASGFDFSRQGMHWVRQAPGQGLEWVAFIKYDGSEKYHADSVWGRLSISRDNSKDTLYLQMNSLRVEDTATYFCVREAGGPDYRNGYNYYDFYDGYYNYHYMDVWGKGTTVTVSS

SEQ ID NO: 677 - protein, 110 aa, synthetic construct
  REGION 1..110: note = Description of Artificial Sequence: Synthetic polypeptide
QSALTQPASVSGSPGQSITISCNGTSNDVGGYESVSWYQQHPGKAPKVVIYDVSKRPSGVSNRFSGSKSGNTASLTISGLQAEDEGDYYCKSLTSTRRRVFGTGTKLTVL

SEQ ID NO: 678 - protein, 137 aa, synthetic construct
  REGION 1..137: note = Description of Artificial Sequence: Synthetic polypeptide
QEQLVESGGGVVQPGGSLRLSCLASGFTFHKYGMHWVRQAPGKGLEWVALISDDGMRKYHSDSMWGRVTISRDNSKNTLYLQFSSLKVEDTAMFFCAREAGGPIWHDDVKYYDFNDGYYNYHYMDVWGKGTTVTVSS

SEQ ID NO: 679 - protein, 110 aa, synthetic construct
  REGION 1..110: note = Description of Artificial Sequence: Synthetic polypeptide
QSALTQPASVSGSPGQTITISCNGTSSDVGGFDSVSWYQQSPGKAPKVMVFDVSHRPSGISNRFSGSKSGNTASLTISGLHIEDEGDYFCSSLTDRSHRIFGGGTKVTVL

SEQ ID NO: 680 - protein, 137 aa, synthetic construct
  REGION 1..137: note = Description of Artificial Sequence: Synthetic polypeptide
DGHLVQSGVEVKKTGATVKISCKVSGYSFIDYYLHWVQRAPGKGLEWVGLIDPENGEARYAEKFQGRVTIIADTSIDTGYMEMRSLKSEDTAVYFCAAGAVGADSGSWFDPWGQGTLVTVSSASTKGPSVFPLAPSS

SEQ ID NO: 681 - protein, 109 aa, synthetic construct
  REGION 1..109: note = Description of Artificial Sequence: Synthetic polypeptide
SYELTQPPSVSVSPGQTASITCSGSKLGDKYVSWYQLRPGQSPILVMYENDRRPSGIPERFSGSNSGDTATLTISGTQALDEADFYCQAWETTTTTFVFFGGGTQLTVL

SEQ ID NO: 682 - protein, 139 aa, synthetic construct
  REGION 1..139: note = Description of Artificial Sequence: Synthetic polypeptide
QVLLVQSGTEVKKPGSSVKVSCQASGGAFSSYAFSWVRQAPGQGLEWMGMITPVFGETKYAPRFQGRLTLTAEESLSTTYMELRSLTSDDTAFYYCTRDRRVVPMATDNWLDPWGQGTLVTVSSASTKGPSVFPLAPSS

SEQ ID NO: 683 - protein, 107 aa, synthetic construct
  REGION 1..107: note = Description of Artificial Sequence: Synthetic polypeptide
DIQLTQSPSSLSASVGDRVTVTCRASQTIHTYLNWYQQIPGKAPKLLIYGASTLQSGVPSRFSGSGSGTDFTLTINSLQPEDFATYYCQQSYSTPRTFGQGTRLDIK

SEQ ID NO: 684 - protein, 140 aa, synthetic construct
  REGION 1..140: note = Description of Artificial Sequence: Synthetic polypeptide
QVQLVQSGAEVKKPGSSVKVSCKASGNSFSNHDVHWVRQATGQGLEWMGWMSHEGDKTGLAQKFQGRVTITRDSGASTVYMELRGLTADDTAIYYCLTGSKHRLRDYFLYNEYGPNYEEWGDYLATLDVWGHGTAVTVSS

SEQ ID NO: 685 - protein, 112 aa, synthetic construct
  REGION 1..112: note = Description of Artificial Sequence: Synthetic polypeptide
EVVITQSPLFLPVTPGEAASLSCKCSHSLQHSTGANYLAWYLQRPGQTPRLLIHLATHRASGVPDRFSGSGSGTDFTLKISRVESDDVGTYYCMQGLHSPWTFGQGTKVEIK

SEQ ID NO: 686 - protein, 141 aa, synthetic construct
  REGION 1..141: note = Description of Artificial Sequence: Synthetic polypeptide
QVQLVQSGPEVKKPGSSVKVSCKASGNTFSKYDVHWVRQATGQGLEWVGWISHERDKTESAQRFKGRVTFTRDTSATTAYMELRGLTSDDTAIYYCTRGSKHRLRDYVLYDDYGLINYQEWNDYLEFLDVWGHGTAVTVSS

SEQ ID NO: 687 - protein, 112 aa, synthetic construct
  REGION 1..112: note = Description of Artificial Sequence: Synthetic polypeptide
DTVVTQSPLSLPVTPGEAASMSCSSTQSLRHSNGANYLAWYQHKPGQSPRLLIRLGSQRASGVPDRFSGSGSGTHFTLKISRVEAEDAAIYYCMQGLNRPWTFGKGTKLEIK

SEQ ID NO: 688 - protein, 141 aa, synthetic construct
  REGION 1..141: note = Description of Artificial Sequence: Synthetic polypeptide
QVQLEQSGAEVKKPGSSVKVSCKASGNTFSKYDVHWVRQATGQGLEWVGWMSHEGDKTESAQRFKGRVTFTRDTSASTAYMELRGLTSDDTAIYYCTRGSKHRLRDYVLYDDYGLINYQEWNDYLEFLDVWGHGTAVTVSS

SEQ ID NO: 689 - protein, 112 aa, synthetic construct
  REGION 1..112: note = Description of Artificial Sequence: Synthetic polypeptide
DTVVTQSPLSLPVTPGEAASMSCTSTQSLRHSNGANYLAWYQHKPGQSPRLLIRLGSQRASGVPDRFSGSGSGTHFTLKISRVEPEDAAIYYCMQGLNRPWTFGKGTKLEIK

SEQ ID NO: 690 - protein, 141 aa, synthetic construct
  REGION 1..141: note = Description of Artificial Sequence: Synthetic polypeptide
QVQLVQSGAEVKKPGSSVKVSCKASGNTFRKYDVHWVRQATGQGLEWVGWMSHEGDKTESAQRFKGRVSFTRDNSASTAYIELRGLTSDDTAIYYCTGGSKHRLRDYVLYDDYGLINQQEWNDYLEFLDVWGHGTAVTVSS

SEQ ID NO: 691 - protein, 112 aa, synthetic construct
  REGION 1..112: note = Description of Artificial Sequence: Synthetic polypeptide
DTVVTQSPLSLSVTPGEAASMSCTSTQSLRHSNGANYLAWYQHKPGQSPRLLIRLGSQRASGVPDRFSGSGSGTHFTLKISRVEADDAAIYYCMQGLNRPWTFGKGTKLEIK

SEQ ID NO: 692 - protein, 135 aa, synthetic construct
  REGION 1..135: note = Description of Artificial Sequence: Synthetic polypeptide
RVQLVESGGGVVQPGKSVRLSCVVSDFPFSKYPMYWVRQAPGKGLEWVAAISGDAWHVVYSNSVQGRFLVSRDNVKNTLYLEMNSLKIEDTAVYRCARMFQESGPPRLDRWSGRNYYYYSGMDVWGQGTTVTVSS

SEQ ID NO: 693 - protein, 111 aa, synthetic construct
  REGION 1..111: note = Description of Artificial Sequence: Synthetic polypeptide
DIVMTQTPLSLSVTPGQPASISCKSSESLRQSNGKTSLYWYRQKPGQSPQLLVFEVSNRFSGVSDRFVGSGSGTDFTLRISRVEAEDVGFYYCMQSKDFPLTFGGGTKVDL

SEQ ID NO: 694 - protein, 132 aa, synthetic construct
  REGION 1..132: note = Description of Artificial Sequence: Synthetic polypeptide
QIHLVQSGTEVKKPGSSVTVSCKAYGVNTFGLYAVNWVRQAPGQSLEYIGQIWRWKSSASHHFRGRVLISAVDLTGSSPPISSLEIKNLTSDDTAVYFCTTTSTYDKWSGLHHDGVMAFSSWGQGTLISVSA

SEQ ID NO: 695 - protein, 108 aa, synthetic construct
  REGION 1..108: note = Description of Artificial Sequence: Synthetic polypeptide
DIQMTQSPSTLSASIGDTVRISCRASQSITGNWVAWYQQRPGKAPRLLIYRGAALLGGVPSRFSGSAAGTDFTLTIGNLQAEDFGTFYCQQYDTYPGTFGQGTKVEVK

SEQ ID NO: 696 - protein, 232 aa, synthetic construct
  REGION 1..232: note = Description of Artificial Sequence: Synthetic polypeptide
EPKSCDKTHTCPPCPAPEAAGGPSVFLFPPKPKDTLMISRTPEVTCVVVDVSHEDPEVKFNWYVDGVEVHNAKTKPREEQYNSTYRVVSVLTVLHQDWLNGKEYKCKVSNKALPASIEKTISKAKGQPREPQVYTLPPSREEMTKNQVSLWCLVKGFYPSDIAVEWESNGQPENNYKTTPPVLDSDGSFFLYSKLTVDKSRWQQGNVFSCSVMHEALHNHYTQKSLSLSPGK

SEQ ID NO: 697 - protein, 232 aa, synthetic construct
  REGION 1..232: note = Description of Artificial Sequence: Synthetic polypeptide
EPKSSDKTHTCPPCPAPEAAGGPSVFLFPPKPKDTLMISRTPEVTCVVVDVSHEDPEVKFNWYVDGVEVHNAKTKPREEQYNSTYRVVSVLTVLHQDWLNGKEYKCKVSNKALPASIEKTISKAKGQPREPQVYTLPPSREEMTKNQVSLSCAVKGFYPSDIAVEWESNGQPENNYKTTPPVLDSDGSFFLVSKLTVDKSRWQQGNVFSCSVMHEALHNRFTQKSLSLSPGK

SEQ ID NO: 698 - protein, 232 aa, synthetic construct
  REGION 1..232: note = Description of Artificial Sequence: Synthetic polypeptide
EPKSSDKTHTCPPCPAPEAAGGPSVFLFPPKPKDTLMISRTPEVTCVVVDVSHEDPEVKFNWYVDGVEVHNAKTKPREEQYNSTYRVVSVLTVLHQDWLNGKEYKCKVSNKALPASIEKTISKAKGQPREPQVYTLPPSREEMTKNQVSLSCAVKGFYPSDIAVEWESNGQPENNYKTTPPVLDSDGSFFLVSKLTVDKSRWQQGNVFSCSVMHEALHNRYTQKSLSLSPGK

SEQ ID NO: 699 - protein, 232 aa, synthetic construct
  REGION 1..232: note = Description of Artificial Sequence: Synthetic polypeptide
EPKSCDKTHTCPPCPAPEAAGGPSVFLFPPKPKDTLMISRTPEVTCVVVDVSHEDPEVKFNWYVDGVEVHNAKTKPREEQYNSTYRVVSVLTVLHQDWLNGKEYKCKVSNKALPASIEKTISKAKGQPREPQVYTLPPSREEMTKNQVSLSCAVKGFYPSDIAVEWESNGQPENNYKTTPPVLDSDGSFFLVSKLTVDKSRWQQGNVFSCSVMHEALHNHYTQKSLSLSPGK

SEQ ID NO: 700 - protein, 232 aa, synthetic construct
  REGION 1..232: note = Description of Artificial Sequence: Synthetic polypeptide
EPKSSDKTHTCPPCPAPEAAGGPSVFLFPPKPKDTLMISRTPEVTCVVVDVSHEDPEVKFNWYVDGVEVHNAKTKPREEQYNSTYRVVSVLTVLHQDWLNGKEYKCKVSNKALPASIEKTISKAKGQPREPQVYTLPPSREEMTKNQVSLWCLVKGFYPSDIAVEWESNGQPENNYKTTPPVLDSDGSFFLYSKLTVDKSRWQQGNVFSCSVMHEALHNHYTQKSLSLSPGK

SEQ ID NO: 701 - protein, 232 aa, synthetic construct
  REGION 1..232: note = Description of Artificial Sequence: Synthetic polypeptide
EPKSCDKTHTCPPCPAPEAAGGPSVFLFPPKPKDTLMISRTPEVTCVVVDVSHEDPEVKFNWYVDGVEVHNAKTKPREEQYNSTYRVVSVLTVLHQDWLNGKEYKCKVSNKALPASIEKTISKAKGQPREPQVYTLPPSREEMTKNQVSLWCLVKGFYPSDIAVEWESNGQPENNYKTTPPVLDSDGSFFLYSKLTVDKSRWQQGNVFSCSVLHEALHSHYTQKSLSLSPGK

SEQ ID NO: 702 - protein, 228 aa, synthetic construct
  REGION 1..228: note = Description of Artificial Sequence: Synthetic polypeptide
SDKTHTCPPCPAPEAAGGPSVFLFPPKPKDTLMISRTPEVTCVVVDVSHEDPEVKFNWYVDGVEVHNAKTKPREEQYNSTYRVVSVLTVLHQDWLNGKEYKCKVSNKALPASIEKTISKAKGQPREPQVYTLPPSREEMTKNQVSLWCLVKGFYPSDIAVEWESNGQPENNYKTTPPVLDSDGSFFLYSKLTVDKSRWQQGNVFSCSVLHEALHSHYTQKSLSLSPGK

SEQ ID NO: 703 - protein, 232 aa, synthetic construct
  REGION 1..232: note = Description of Artificial Sequence: Synthetic polypeptide
EPKSCDKTHTCPPCPAPEAAGGPSVFLFPPKPKDTLMISRTPEVTCVVVDVSHEDPEVKFNWYVDGVEVHNAKTKPREEQYNSTYRVVSVLTVLHQDWLNGKEYKCKVSNKALPASIEKTISKAKGQPREPQVYTLPPSREEMTKNQVSLSCAVKGFYPSDIAVEWESNGQPENNYKTTPPVLDSDGSFFLVSKLTVDKSRWQQGNVFSCSVMHEALHNRYTQKSLSLSPGK

SEQ ID NO: 704 - protein, 232 aa, synthetic construct
  REGION 1..232: note = Description of Artificial Sequence: Synthetic polypeptide
EPKSCDKTHTCPPCPAPEAAGGPSVFLFPPKPKDTLYITREPEVTCVVVDVSHEDPEVKFNWYVDGVEVHNAKTKPREEQYNSTYRVVSVLTVLHQDWLNGKEYKCKVSNKALPASIEKTISKAKGQPREPQVYTLPPSREEMTKNQVSLWCLVKGFYPSDIAVEWESNGQPENNYKTTPPVLDSDGSFFLYSKLTVDKSRWQQGNVFSCSVMHEALHNHYTQKSLSLSPGK

SEQ ID NO: 705 - protein, 228 aa, synthetic construct
  REGION 1..228: note = Description of Artificial Sequence: Synthetic polypeptide
SDKTHTCPPCPAPEAAGGPSVFLFPPKPKDTLYITREPEVTCVVVDVSHEDPEVKFNWYVDGVEVHNAKTKPREEQYNSTYRVVSVLTVLHQDWLNGKEYKCKVSNKALPASIEKTISKAKGQPREPQVYTLPPSREEMTKNQVSLWCLVKGFYPSDIAVEWESNGQPENNYKTTPPVLDSDGSFFLYSKLTVDKSRWQQGNVFSCSVMHEALHNHYTQKSLSLSPGK

SEQ ID NO: 706 - protein, 228 aa, synthetic construct
  REGION 1..228: note = Description of Artificial Sequence: Synthetic polypeptide
SDKTHTCPPCPAPEAAGGPSVFLFPPKPKDTLMISRTPEVTCVVVDVSHEDPEVKFNWYVDGVEVHNAKTKPREEQYNSTYRVVSVLTVLHQDWLNGKEYKCKVSNKALPASIEKTISKAKGQPREPQVYTLPPSREEMTKNQVSLSCAVKGFYPSDIAVEWESNGQPENNYKTTPPVLDSDGSFFLVSKLTVDKSRWQQGNVFSCSVMHEALHNRYTQKSLSLSPGK

SEQ ID NO: 707 - protein, 228 aa, synthetic construct
  REGION 1..228: note = Description of Artificial Sequence: Synthetic polypeptide
SDKTHTCPPCPAPEAAGGPSVFLFPPKPKDTLMISRTPEVTCVVVDVSHEDPEVKFNWYVDGVEVHNAKTKPREEQYNSTYRVVSVLTVLHQDWLNGKEYKCKVSNKALPASIEKTISKAKGQPREPQVYTLPPSREEMTKNQVSLWCLVKGFYPSDIAVEWESNGQPENNYKTTPPVLDSDGSFFLYSKLTVDKSRWQQGNVFSCSVMHEALHNHYTQKSLSLSPGK

SEQ ID NO: 708 - protein, 228 aa, synthetic construct
  REGION 1..228: note = Description of Artificial Sequence: Synthetic polypeptide
SDKTHTCPPCPAPEAAGGPSVFLFPPKPKDTLYITREPEVTCVVVDVSHEDPEVKFNWYVDGVEVHNAKTKPREEQYNSTYRVVSVLTVLHQDWLNGKEYKCKVSNKALPASIEKTISKAKGQPREPQVYTLPPSREEMTKNQVSLSCAVKGFYPSDIAVEWESNGQPENNYKTTPPVLDSDGSFFLVSKLTVDKSRWQQGNVFSCSVMHEALHNHYTQKSLSLSPGK

SEQ ID NO: 709 - protein, 232 aa, synthetic construct
  REGION 1..232: note = Description of Artificial Sequence: Synthetic polypeptide
EPKSSDKTHTCPPCPAPEAAGGPSVFLFPPKPKDTLYITREPEVTCVVVDVSHEDPEVKFNWYVDGVEVHNAKTKPREEQYNSTYRVVSVLTVLHQDWLNGKEYKCKVSNKALPASIEKTISKAKGQPREPQVYTLPPSREEMTKNQVSLWCLVKGFYPSDIAVEWESNGQPENNYKTTPPVLDSDGSFFLYSKLTVDKSRWQQGNVFSCSVMHEALHNHYTQKSLSLSPGK

SEQ ID NO: 710 - protein, 232 aa, synthetic construct
  REGION 1..232: note = Description of Artificial Sequence: Synthetic polypeptide
EPKSCDKTHTCPPCPAPEAAGGPSVFLFPPKPKDTLYITREPEVTCVVVDVSHEDPEVKFNWYVDGVEVHNAKTKPREEQYNSTYRVVSVLTVLHQDWLNGKEYKCKVSNKALPASIEKTISKAKGQPREPQVYTLPPSREEMTKNQVSLSCAVKGFYPSDIAVEWESNGQPENNYKTTPPVLDSDGSFFLVSKLTVDKSRWQQGNVFSCSVMHEALHNHYTQKSLSLSPGK

SEQ ID NO: 711 - protein, 16 aa, synthetic construct
  REGION 1..16: note = Description of Artificial Sequence: Synthetic peptide
GGGSGGGSGGGSGGGS

SEQ ID NO: 712 - protein, 20 aa, synthetic construct
  REGION 1..20: note = Description of Artificial Sequence: Synthetic peptide
  REGION 1..20: note = MISC_FEATURE - This sequence may encompass 3-4 "Gly Gly Gly Gly Ser" repeating units
GGGGSGGGGSGGGGSGGGGS

SEQ ID NO: 713 - protein, 125 aa, synthetic construct
  REGION 1..125: note = Description of Artificial Sequence: Synthetic polypeptide
EVKLLESGGGLVQPKGSLKLSCAASGFTFNTYAMNWVRQAPGKGLEWVARIRSKYNNYATYYADSVKDRFTISRDDSQSILYLQMNNLKTEDTAMYYCVRHGNFGNSYVSWFAYWGQGTLVTVSA

SEQ ID NO: 714 - protein, 110 aa, synthetic construct
  REGION 1..110: note = Description of Artificial Sequence: Synthetic polypeptide
QAVVTQESALTTSPGETVTLTCRSSTGAVTTSNYANWVQEKPDHLFTGLIGGTNKRAPGVPARFSGSLIGDKAALTITGAQTEDEAIYFCALWYSNLWVFGGGTKLTVLG

SEQ ID NO: 715 - protein, 125 aa, synthetic construct
  REGION 1..125: note = Description of Artificial Sequence: Synthetic polypeptide
EVQLVESGGGLVQPGGSLRLSCAASGFTFSTYAMNWVRQAPGKGLEWVGRIRSKYNNYATYYAASVKGRFTISRDDSKNSLYLQMNSLKTEDTAMYYCVRHGNFGNSYVSWFAVWGQGTLVTVSS

SEQ ID NO: 716 - protein, 125 aa, synthetic construct
  REGION 1..125: note = Description of Artificial Sequence: Synthetic polypeptide
EVQLVESGGGLVQPGGSLRLSCAASGFTFSTYAMNWVRQAPGKGLEWVGRIRSKYNNYATYYAASVKGRFTISRDDSKNSLYLQMNSLRTEDTAVYYCVRHGNFGHSYVSWFAVWGQGTLVTVSS

SEQ ID NO: 717 - protein, 125 aa, synthetic construct
  REGION 1..125: note = Description of Artificial Sequence: Synthetic polypeptide
EVQLVESGGGLVQPGGSLRLSCAASGFTFSTYAMNWVRQAPGKGLEWVGRIRSKYNNYATYYADSVKGRFTISRDNSKNTLYLQMNSLRAEDTAVYYCVRHGNFGHSYVSWFAVWGQGTLVTVSS

SEQ ID NO: 718 - protein, 125 aa, synthetic construct
  REGION 1..125: note = Description of Artificial Sequence: Synthetic polypeptide
EVQLVESGGGLVQPGGSLRLSCAASGFTFSTYAMNWVRQAPGKGLEWVGRIRSKYNNYATYYADSVKGRFTISRDNSKNTLYLQMNSLRAEDTAMYYCVRHGNFGNSYVSWFAVWGQGTLVTVSS

SEQ ID NO: 719 - protein, 125 aa, synthetic construct
  REGION 1..125: note = Description of Artificial Sequence: Synthetic polypeptide
EVQLVESGGGLVQPGGSLRLSCAASGFTFSDYAMNWVRQAPGKGLEWVGRTRSKYNNYATYYAASVKGRFTISRDDSKNSLYLQMNSLKTEDTAVYYCVRHGNFGNSYVSWFAVWGQGTLVTVSS

SEQ ID NO: 720 - protein, 125 aa, synthetic construct
  REGION 1..125: note = Description of Artificial Sequence: Synthetic polypeptide
EVQLVESGGGLVQPGGSLRLSCAASGFTFSDYAMNWVRQAPGKGLEWVGRTRSKYNNYATYYAASVKGRFTISRDDSKNSLYLQMNSLKTEDTAVYYCVRHGNFGHSYVSWFAVWGQGTLVTVSS

SEQ ID NO: 721 - protein, 125 aa, synthetic construct
  REGION 1..125: note = Description of Artificial Sequence: Synthetic polypeptide
EVQLVESGGGLVQPGGSLRLSCAASGFTFSDYAMNWVRQAPGKGLEWVGRTRSKYNSYATYYAASVKGRFTISRDDSKNSLYLQMNSLKTEDTAVYYCVRHGNFGNSYVSWFAVWGQGTLVTVSS

SEQ ID NO: 722 - protein, 125 aa, synthetic construct
  REGION 1..125: note = Description of Artificial Sequence: Synthetic polypeptide
EVQLVESGGGLVQPGGSLRLSCAASGFTFSDYAMNWVRQAPGKGLEWVGRTRSKYNSYATYYAASVKGRFTISRDDSKNSLYLQMNSLKTEDTAVYYCVRHGNFGHSYVSWFAVWGQGTLVTVSS

SEQ ID NO: 723 - protein, 109 aa, synthetic construct
  REGION 1..109: note = Description of Artificial Sequence: Synthetic polypeptide
QAVVTQEPSLTVSPGGTVTLTCRSSTGAVTTSNYANWVQQKPGQAPRGLIGGTNKRAPWTPARFSGSLIGDKAALTLSGAQPEDEAEYYCALWYSNLWVFGGGTKLTVL

SEQ ID NO: 724 - protein, 109 aa, synthetic construct
  REGION 1..109: note = Description of Artificial Sequence: Synthetic polypeptide
QAVVTQEPSLTVSPGGTVTLTCGSSTGAVTTSNYANWVQQKPGQAPRGLIGGTSNRAPWTPARFSGSLLGGKAALTLSGAQPEDEAEYYCALWYSNLWVFGGGTKLTVL

SEQ ID NO: 725 - protein, 109 aa, synthetic construct
  REGION 1..109: note = Description of Artificial Sequence: Synthetic polypeptide
QAVVTQEPSLTVSPGGTVTLTCGSSTGAVTTSHYANWVQQKPGQAPRGLIGGTSKRAPWTPARFSGSLLGGKAALTLSGAQPEDEAEYYCALWYSALWVFGGGTKLTVL

SEQ ID NO: 726 - protein, 109 aa, synthetic construct
  REGION 1..109: note = Description of Artificial Sequence: Synthetic polypeptide
QAVVTQEPSLTVSPGGTVTLTCGSSTGAVTTGHYANWVQQKPGQAPRGLIGGTSNRAPWTPARFSGSLLGGKAALTLSGAQPEDEAEYYCALWYSARWVFGGGTKLTVL

SEQ ID NO: 727 - protein, 109 aa, synthetic construct
  REGION 1..109: note = Description of Artificial Sequence: Synthetic polypeptide
QAVVTQPPSLTVSPGGTVTLTCGSSTGAVTTGHYANWVQQKPGQAPRGLIGGTSNRAPGVPARFSGSLSGGKAALTISGAQPEDEAEYYCALWYSARWVFGGGTKLTVL

SEQ ID NO: 728 - protein, 125 aa, synthetic construct
  REGION 1..125: note = Description of Artificial Sequence: Synthetic polypeptide
EVQLVESGGGLVQPGGSLRLSCAASGFTFSTYAMNWVRQAPGKGLEWVGRIRSKYNNYATYYAASVKGRFTISRDDSKNSLYLQMNSLRTEDTAVYYCVRHGNFGHSYVSWFAYWGQGTLVTVSS

SEQ ID NO: 729 - protein, 125 aa, synthetic construct
  REGION 1..125: note = Description of Artificial Sequence: Synthetic polypeptide
EVQLVESGGGLVQPGGSLRLSCAASGFTFSTYAMNWVRQAPGKGLEWVARIRSKYNNYATYYAASVKGRFTISRDDSKNSLYLQMNSLRTEDTAVYYCVRHGNFGHSYVSWFAYWGQGTLVTVSS

SEQ ID NO: 730 - protein, 125 aa, synthetic construct
  REGION 1..125: note = Description of Artificial Sequence: Synthetic polypeptide
EVQLVESGGGLVQPGGSLRLSCAASGFTFSTYAMNWVRQAPGKGLEWVGRIRSKYNNYATYYAASVKGRFTISRDDSKNTLYLQMNSLRTEDTAVYYCVRHGNFGHSYVSWFAYWGQGTLVTVSS

SEQ ID NO: 731 - protein, 109 aa, synthetic construct
  REGION 1..109: note = Description of Artificial Sequence: Synthetic polypeptide
QAVVTQEPSLTVSPGGTVTLTCRSSTGAVTTGHYANWVQQKPGQAPRGLIGGTNKRAPGVPARFSGSLLGGKAALTISGAQPEDEAEYYCALWYSNLWVFGGGTKLTVL

SEQ ID NO: 732 - protein, 109 aa, synthetic construct
  REGION 1..109: note = Description of Artificial Sequence: Synthetic polypeptide
QAVVTQPPSLTVSPGGTVTLTCGSSTGAVTTGHYANWVQQKPGQAPRGLIGGTNKRAPGVPARFSGSLSGGKAALTISGAQPEDEAEYYCALWYSNLWVFGGGTKLTVL

SEQ ID NO: 733 - protein, 109 aa, synthetic construct
  REGION 1..109: note = Description of Artificial Sequence: Synthetic polypeptide
QAVVTQPPSLTVSPGGTVTLTCGSSTGAVTTGHYANWVQQKPGQAPRGLIGGTNKRAPGVPARFSGSLSGGKAALTISGAQPEDEAEYYCALWYSNRWVFGGGTKLTVL

SEQ ID NO: 734 - protein, 125 aa, synthetic construct
  REGION 1..125: note = Description of Artificial Sequence: Synthetic polypeptide
EVQLVESGGGLVQPGGSLRLSCAASGFTFNDYAMNWVRQAPGKGLEWVGRTRSKYNNYATYYAASVKGRFTISRDDSKNSLYLQMNSLKTEDTAMYYCVRHGNFGHSYVSWFAYWGQGTLVTVSS

SEQ ID NO: 735 - protein, 125 aa, synthetic construct
  REGION 1..125: note = Description of Artificial Sequence: Synthetic polypeptide
EVQLVESGGGLVQPGGSLRLSCAASGFTFNDYAMNWVRQAPGKGLEWVGRIRSKYNNYATYYAASVKGRFTISRDDSKNSLYLQMNSLKTEDTAMYYCVRHGNFGHSYVSWFAYWGQGTLVTVSS

SEQ ID NO: 736 - protein, 125 aa, synthetic construct
  REGION 1..125: note = Description of Artificial Sequence: Synthetic polypeptide
EVQLVESGGGLVQPGGSLRLSCAASGFTFNTYAMNWVRQAPGKGLEWVGRTRSKYNNYATYYAASVKGRFTISRDDSKNSLYLQMNSLKTEDTAMYYCVRHGNFGHSYVSWFAYWGQGTLVTVSS

SEQ ID NO: 737 - protein, 125 aa, synthetic construct
  REGION 1..125: note = Description of Artificial Sequence: Synthetic polypeptide
EVQLVESGGGLVQPGGSLRLSCAASGFTFNDYAMNWVRQAPGKGLEWVGRTRSKYNNYATYYADSVKGRFTISRDDSKNSLYLQMNSLRTEDTAVYYCVRHGNFGHSYVSWFAYWGQGTLVTVSS

SEQ ID NO: 738 - protein, 109 aa, synthetic construct
  REGION 1..109: note = Description of Artificial Sequence: Synthetic polypeptide
QAVVTQEPSLTVSPGGTVTLTCGSSTGAVTTGHYANWVQQKPGQAPRGLIGGTNKRAPGVPARFSGSLLGGKAALTLSGAQPEDEAEYYCALWYSNLWVFGGGTKLTVL

SEQ ID NO: 739 - protein, 109 aa, synthetic construct
  REGION 1..109: note = Description of Artificial Sequence: Synthetic polypeptide
QAVVTQPPSLTVSPGGTVTLTCGSSTGAVTTGHYANWVQQKPGQAPRGLIGGTNKRAPWTPARFSGSLSGGKAALTISGAQPEDEAEYYCALWYSNRWVFGGGTKLTVL

SEQ ID NO: 740 - protein, 109 aa, synthetic construct
  REGION 1..109: note = Description of Artificial Sequence: Synthetic polypeptide
QAVVTQPPSLTVSPGGTVTLTCGSSTGAVTTGHYANWVQQKPGQAPRGLIGGTSNRAPGVPARFSGSLSGGKAALTISGAQPEDEAEYYCALWYSNRWVFGGGTKLTVL

SEQ ID NO: 741 - protein, 109 aa, synthetic construct
  REGION 1..109: note = Description of Artificial Sequence: Synthetic polypeptide
QAVVTQPPSLTVSPGGTVTLTCGSSTGAVTTGHYANWVQQKPGQAPRGLIGGTNKRAPGVPARFSGSLSGGKAALTISGAQPEDEAEYYCALWYSARWVFGGGTKLTVL

SEQ ID NO: 742 - protein, 109 aa, synthetic construct
  REGION 1..109: note = Description of Artificial Sequence: Synthetic polypeptide
QAVVTQPPSLTVSPGGTVTLTCGSSTGAVTTGHYANWVQQKPGQAPRGLIGGTSNRAPWTPARFSGSLSGGKAALTISGAQPEDEAEYYCALWYSNRWVFGGGTKLTVL

SEQ ID NO: 743 - protein, 109 aa, synthetic construct
  REGION 1..109: note = Description of Artificial Sequence: Synthetic polypeptide
QAVVTQPPSLTVSPGGTVTLTCGSSTGAVTTGHYANWVQQKPGQAPRGLIGGTNKRAPWTPARFSGSLSGGKAALTISGAQPEDEAEYYCALWYSARWVFGGGTKLTVL

SEQ ID NO: 744 - protein, 109 aa, synthetic construct
  REGION 1..109: note = Description of Artificial Sequence: Synthetic polypeptide
QAVVTQPPSLTVSPGGTVTLTCGSSTGAVTTGHYANWVQQKPGQAPRGLIGGTSNRAPWTPARFSGSLSGGKAALTISGAQPEDEAEYYCALWYSARWVFGGGTKLTVL

SEQ ID NO: 745 - protein, 109 aa, synthetic construct
  REGION 1..109: note = Description of Artificial Sequence: Synthetic polypeptide
QAVVTQEPSLTVSPGGTVTLTCGSSTGAVTTGHYANWVQQKPGQAPRGLIGGTNKRAPGVPARFSGSLLGGKAALTISGAQPEDEAEYYCALWYSARWVFGGGTKLTVL

SEQ ID NO: 746 - protein, 99 aa, unidentified
  REGION 1..99: note = Description of Unknown: EC domain of CD4 sequence
KKVVYGKKGDTVELTCTASQKKNIQFHWKNSNQIKILGNQGSFLTKGPSKLNDRVDSRRSLWDQGNFPLIIKNLKPEDSDTYICEVEDQKEEVQLVVVG

SEQ ID NO: 747 - protein, 203 aa, unidentified
  REGION 1..203: note = Description of Unknown: EC domain of CD4 sequence
KKVVYGKKGDTVELTCTASQKKNIQFHWKNSNQIKILGNQGSFLTKGPSKLNDRVDSRRSLWDQGNFPLIIKNLKPEDSDTYICEVEDQKEEVQLVVVGGGGSGKKVVYGKKGDTVELTCTASQKKNIQFHWKNSNQIKILGNQGSFLTKGPSKLNDRVDSRRSLWDQGNFPLIIKNLKPEDSDTYICEVEDQKEEVQLVVVG

SEQ ID NO: 748 - protein, 99 aa, unidentified
  REGION 1..99: note = Description of Unknown: EC domain of CD4 sequence
KKVVLGKKGDTVELTCTASQKKSIQFHWKNSNQIKILGNQGSFLTKGPSKLNDRADSRRSLWDQGNFPLIIKNLKIEDSDTYICEVEDQKEEVQLLVFG

SEQ ID NO: 749 - protein, 203 aa, unidentified
  REGION 1..203: note = Description of Unknown: EC domain of CD4 sequence
KKVVLGKKGDTVELTCTASQKKSIQFHWKNSNQIKILGNQGSFLTKGPSKLNDRADSRRSLWDQGNFPLIIKNLKIEDSDTYICEVEDQKEEVQLLVFGGGGSGKKVVLGKKGDTVELTCTASQKKSIQFHWKNSNQIKILGNQGSFLTKGPSKLNDRADSRRSLWDQGNFPLIIKNLKIEDSDTYICEVEDQKEEVQLLVFG

SEQ ID NO: 750 - protein, 20 aa, synthetic construct
  REGION 1..20: note = Description of Artificial Sequence: Synthetic peptide
GGGGSGGGGSGGGGSGGGGS

SEQ ID NO: 751 - protein, 328 aa, synthetic construct
  REGION 1..328: note = Description of Artificial Sequence: Synthetic polypeptide
KKVVYGKKGDTVELTCTASQKKNIQFHWKNSNQIKILGNQGSFLTKGPSKLNDRVDSRRSLWDQGNFPLIIKNLKPEDSDTYICEVEDQKEEVQLVVVGGSDKTHTCPPCPAPEAAGGPSVFLFPPKPKDTLYITREPEVTCVVVDVSHEDPEVKFNWYVDGVEVHNAKTKPREEQYNSTYRVVSVLTVLHQDWLNGKEYKCKVSNKALPASIEKTISKAKGQPREPQVYTLPPSREEMTKNQVSLWCLVKGFYPSDIAVEWESNGQPENNYKTTPPVLDSDGSFFLYSKLTVDKSRWQQGNVFSCSVMHEALHNHYTQKSLSLSPGK

SEQ ID NO: 752 - protein, 455 aa, synthetic construct
  REGION 1..455: note = Description of Artificial Sequence: Synthetic polypeptide
EVQLVESGGGLVQPGGSLRLSCAASGFTFNTYAMNWVRQAPGKGLEWVGRIRSKYNNYATYYADSVKSRFTISRDDSKNSLYLEMNSLRTEDTAVYYCVRHGNFGHSYVSWFAYWGQGTLVTVSSASTKGPSVFPLAPSSKSTSGGTAALGCLVKDYFPEPVTVSWNSGALTSGVHTFPAVLQSSGLYSLSSVVTVPSSSLGTQTYICNVNHKPSNTKVDKKVEPKSCDKTHTCPPCPAPEAAGGPSVFLFPPKPKDTLMISRTPEVTCVVVDVSHEDPEVKFNWYVDGVEVHNAKTKPREEQYNSTYRVVSVLTVLHQDWLNGKEYKCKVSNKALPASIEKTISKAKGQPREPQVYTLPPSREEMTKNQVSLSCAVKGFYPSDIAVEWESNGQPENNYKTTPPVLDSDGSFFLVSKLTVDKSRWQQGNVFSCSVMHEALHNRYTQKSLSLSPGK

SEQ ID NO: 753 - protein, 215 aa, synthetic construct
  REGION 1..215: note = Description of Artificial Sequence: Synthetic polypeptide
QAVVTQEPSLTVSPGGTVTLTCGSSTGAVTTGHYANWVQQKPGQAPRGLIGGTSNRAPGVPARFSGSLLGGKAALTISGAQPEDEAEYYCALWYSNRWVFGGGTKLTVLGQPKAAPSVTLFPPSSEELQANKATLVCLISDFYPGAVTVAWKADSSPVKAGVETTTPSKQSNNKYAASSYLSLTPEQWKSHRSYSCQVTHEGSTVEKTVAPTECS

SEQ ID NO: 754 - protein, 328 aa, synthetic construct
  REGION 1..328: note = Description of Artificial Sequence: Synthetic polypeptide
KKVVYGKKGDTVELTCTASQKKNIQFHWKNSNQIKILGNQGSFLTKGPSKLNDRVDSRRSLWDQGNFPLIIKNLKPEDSDTYICEVEDQKEEVQLVVVGGSDKTHTCPPCPAPEAAGGPSVFLFPPKPKDTLMISRTPEVTCVVVDVSHEDPEVKFNWYVDGVEVHNAKTKPREEQYNSTYRVVSVLTVLHQDWLNGKEYKCKVSNKALPASIEKTISKAKGQPREPQVYTLPPSREEMTKNQVSLWCLVKGFYPSDIAVEWESNGQPENNYKTTPPVLDSDGSFFLYSKLTVDKSRWQQGNVFSCSVMHEALHNHYTQKSLSLSPGK

SEQ ID NO: 755 - protein, 328 aa, synthetic construct
  REGION 1..328: note = Description of Artificial Sequence: Synthetic polypeptide
KKVVYGKKGDTVELTCTASQKKNIQFHWKNSNQIKILGNQGSFLTKGPSKLNDRVDSRRSLWDQGNFPLIIKNLKPEDSDTYICEVEDQKEEVQLVVVGGSDKTHTCPPCPAPEAAGGPSVFLFPPKPKDTLMISRTPEVTCVVVDVSHEDPEVKFNWYVDGVEVHNAKTKPREEQYNSTYRVVSVLTVLHQDWLNGKEYKCKVSNKALPASIEKTISKAKGQPREPQVYTLPPSREEMTKNQVSLSCAVKGFYPSDIAVEWESNGQPENNYKTTPPVLDSDGSFFLVSKLTVDKSRWQQGNVFSCSVMHEALHNRYTQKSLSLSPGK

SEQ ID NO: 756 - protein, 455 aa, synthetic construct
  REGION 1..455: note = Description of Artificial Sequence: Synthetic polypeptide
EVQLVESGGGLVQPGGSLRLSCAASGFTFNTYAMNWVRQAPGKGLEWVGRIRSKYNNYATYYADSVKGRFTISRDDSKNSLYLQMNSLRTEDTAVYYCVRHGNFGHSYVSWFAYWGQGTLVTVSSASTKGPSVFPLAPSSKSTSGGTAALGCLVKDYFPEPVTVSWNSGALTSGVHTFPAVLQSSGLYSLSSVVTVPSSSLGTQTYICNVNHKPSNTKVDKKVEPKSCDKTHTCPPCPAPEAAGGPSVFLFPPKPKDTLYITREPEVTCVVVDVSHEDPEVKFNWYVDGVEVHNAKTKPREEQYNSTYRVVSVLTVLHQDWLNGKEYKCKVSNKALPASIEKTISKAKGQPREPQVYTLPPSREEMTKNQVSLWCLVKGFYPSDIAVEWESNGQPENNYKTTPPVLDSDGSFFLYSKLTVDKSRWQQGNVFSCSVMHEALHNHYTQKSLSLSPGK

SEQ ID NO: 757 - protein, 455 aa, synthetic construct
  REGION 1..455: note = Description of Artificial Sequence: Synthetic polypeptide
EVQLVESGGGLVQPGGSLRLSCAASGFTFNTYAMNWVRQAPGKGLEWVGRIRSKYNNYATYYADSVKGRFTISRDDSKNSLYLQMNSLRTEDTAVYYCVRHGNFGHSYVSWFAYWGQGTLVTVSSASTKGPSVFPLAPSSKSTSGGTAALGCLVKDYFPEPVTVSWNSGALTSGVHTFPAVLQSSGLYSLSSVVTVPSSSLGTQTYICNVNHKPSNTKVDKKVEPKSCDKTHTCPPCPAPEAAGGPSVFLFPPKPKDTLMISRTPEVTCVVVDVSHEDPEVKFNWYVDGVEVHNAKTKPREEQYNSTYRVVSVLTVLHQDWLNGKEYKCKVSNKALPASIEKTISKAKGQPREPQVYTLPPSREEMTKNQVSLWCLVKGFYPSDIAVEWESNGQPENNYKTTPPVLDSDGSFFLYSKLTVDKSRWQQGNVFSCSVMHEALHNHYTQKSLSLSPGK

SEQ ID NO: 758 - protein, 328 aa, synthetic construct
  REGION 1..328: note = Description of Artificial Sequence: Synthetic polypeptide
KKVVYGKKGDTVELTCTASQKKNIQFHWKNSNQIKILGNQGSFLTKGPSKLNDRVDSRRSLWDQGNFPLIIKNLKPEDSDTYICEVEDQKEEVQLVVVGGSDKTHTCPPCPAPEAAGGPSVFLFPPKPKDTLMISRTPEVTCVVVDVSHEDPEVKFNWYVDGVEVHNAKTKPREEQYNSTYRVVSVLTVLHQDWLNGKEYKCKVSNKALPASIEKTISKAKGQPREPQVYTLPPSREEMTKNQVSLSCAVKGFYPSDIAVEWESNGQPENNYKTTPPVLDSDGSFFLVSKLTVDKSRWQQGNVFSCSVMHEALHNHYTQKSLSLSPGK

SEQ ID NO: 759 - protein, 328 aa, synthetic construct
  REGION 1..328: note = Description of Artificial Sequence: Synthetic polypeptide
KKVVYGKKGDTVELTCTASQKKNIQFHWKNSNQIKILGNQGSFLTKGPSKLNDRVDSRRSLWDQGNFPLIIKNLKPEDSDTYICEVEDQKEEVQLVVVGGSDKTHTCPPCPAPEAAGGPSVFLFPPKPKDTLYITREPEVTCVVVDVSHEDPEVKFNWYVDGVEVHNAKTKPREEQYNSTYRVVSVLTVLHQDWLNGKEYKCKVSNKALPASIEKTISKAKGQPREPQVYTLPPSREEMTKNQVSLSCAVKGFYPSDIAVEWESNGQPENNYKTTPPVLDSDGSFFLVSKLTVDKSRWQQGNVFSCSVMHEALHNHYTQKSLSLSPGK

SEQ ID NO: 760 - protein, 455 aa, synthetic construct
  REGION 1..455: note = Description of Artificial Sequence: Synthetic polypeptide
EVQLVESGGGLVQPGGSLRLSCAASGFTFNTYAMNWVRQAPGKGLEWVGRIRSKYNNYATYYAASVKGRFTISRDDSKNSLYLQMNSLKTEDTAMYYCVRHGNFGNSYVSWFAYWGQGTLVTVSSASTKGPSVFPLAPSSKSTSGGTAALGCLVKDYFPEPVTVSWNSGALTSGVHTFPAVLQSSGLYSLSSVVTVPSSSLGTQTYICNVNHKPSNTKVDKKVEPKSCDKTHTCPPCPAPEAAGGPSVFLFPPKPKDTLMISRTPEVTCVVVDVSHEDPEVKFNWYVDGVEVHNAKTKPREEQYNSTYRVVSVLTVLHQDWLNGKEYKCKVSNKALPASIEKTISKAKGQPREPQVYTLPPSREEMTKNQVSLSCAVKGFYPSDIAVEWESNGQPENNYKTTPPVLDSDGSFFLVSKLTVDKSRWQQGNVFSCSVMHEALHNRYTQKSLSLSPGK

SEQ ID NO: 761 - protein, 215 aa, synthetic construct
  REGION 1..215: note = Description of Artificial Sequence: Synthetic polypeptide
QAVVTQEPSLTVSPGGTVTLTCGSSTGAVTTGHYANWVQQKPGQAPRGLIGGTNKRAPWTPARFSGSLLGGKAALTLSGAQPEDEAEYYCALWYSNLWVFGGGTKLTVLGQPKAAPSVTLFPPSSEELQANKATLVCLISDFYPGAVTVAWKADSSPVKAGVETTTPSKQSNNKYAASSYLSLTPEQWKSHRSYSCQVTHEGSTVEKTVAPTECS

SEQ ID NO: 762 - protein, 328 aa, synthetic construct
  REGION 1..328: note = Description of Artificial Sequence: Synthetic polypeptide
KKVVYGKKGDTVELTCTASQKKNIQFHWKNSNQIKILGNQGSFLTKGPSKLNDRVDSRRSLWDQGNFPLIIKNLKPEDSDTYICEVEDQKEEVQLVVVGGSDKTHTCPPCPAPEAAGGPSVFLFPPKPKDTLMISRTPEVTCVVVDVSHEDPEVKFNWYVDGVEVHNAKTKPREEQYNSTYRVVSVLTVLHQDWLNGKEYKCKVSNKALPASIEKTISKAKGQPREPQVYTLPPSREEMTKNQVSLWCLVKGFYPSDIAVEWESNGQPENNYKTTPPVLDSDGSFFLYSKLTVDKSRWQQGNVFSCSVLHEALHSHYTQKSLSLSPGK

SEQ ID NO: 763 - protein, 455 aa, synthetic construct
  REGION 1..455: note = Description of Artificial Sequence: Synthetic polypeptide
EVQLVESGGGLVQPGGSLRLSCAASGFTFNTYAMNWVRQAPGKGLEWVGRIRSKYNNYAAYYADSVKSRFTISRDDSKNSLYLQMNSLRTEDTAVYYCVRHGNFGHSYVSWFAYWGQGTLVTVSSASTKGPSVFPLAPSSKSTSGGTAALGCLVKDYFPEPVTVSWNSGALTSGVHTFPAVLQSSGLYSLSSVVTVPSSSLGTQTYICNVNHKPSNTKVDKKVEPKSCDKTHTCPPCPAPEAAGGPSVFLFPPKPKDTLMISRTPEVTCVVVDVSHEDPEVKFNWYVDGVEVHNAKTKPREEQYNSTYRVVSVLTVLHQDWLNGKEYKCKVSNKALPASIEKTISKAKGQPREPQVYTLPPSREEMTKNQVSLSCAVKGFYPSDIAVEWESNGQPENNYKTTPPVLDSDGSFFLVSKLTVDKSRWQQGNVFSCSVMHEALHNRYTQKSLSLSPGK

SEQ ID NO: 764 - protein, 432 aa, synthetic construct
  REGION 1..432: note = Description of Artificial Sequence: Synthetic polypeptide
KKVVYGKKGDTVELTCTASQKKNIQFHWKNSNQIKILGNQGSFLTKGPSKLNDRVDSRRSLWDQGNFPLIIKNLKPEDSDTYICEVEDQKEEVQLVVVGGGGSGKKVVYGKKGDTVELTCTASQKKNIQFHWKNSNQIKILGNQGSFLTKGPSKLNDRVDSRRSLWDQGNFPLIIKNLKPEDSDTYICEVEDQKEEVQLVVVGGSDKTHTCPPCPAPEAAGGPSVFLFPPKPKDTLYITREPEVTCVVVDVSHEDPEVKFNWYVDGVEVHNAKTKPREEQYNSTYRVVSVLTVLHQDWLNGKEYKCKVSNKALPASIEKTISKAKGQPREPQVYTLPPSREEMTKNQVSLWCLVKGFYPSDIAVEWESNGQPENNYKTTPPVLDSDGSFFLYSKLTVDKSRWQQGNVFSCSVMHEALHNHYTQKSLSLSPGK

SEQ ID NO: 765 - protein, 432 aa, synthetic construct
  REGION 1..432: note = Description of Artificial Sequence: Synthetic polypeptide
KKVVYGKKGDTVELTCTASQKKNIQFHWKNSNQIKILGNQGSFLTKGPSKLNDRVDSRRSLWDQGNFPLIIKNLKPEDSDTYICEVEDQKEEVQLVVVGGGGSGKKVVYGKKGDTVELTCTASQKKNIQFHWKNSNQIKILGNQGSFLTKGPSKLNDRVDSRRSLWDQGNFPLIIKNLKPEDSDTYICEVEDQKEEVQLVVVGGSDKTHTCPPCPAPEAAGGPSVFLFPPKPKDTLMISRTPEVTCVVVDVSHEDPEVKFNWYVDGVEVHNAKTKPREEQYNSTYRVVSVLTVLHQDWLNGKEYKCKVSNKALPASIEKTISKAKGQPREPQVYTLPPSREEMTKNQVSLWCLVKGFYPSDIAVEWESNGQPENNYKTTPPVLDSDGSFFLYSKLTVDKSRWQQGNVFSCSVMHEALHNHYTQKSLSLSPGK

SEQ ID NO: 766 - protein, 432 aa, synthetic construct
  REGION 1..432: note = Description of Artificial Sequence: Synthetic polypeptide
KKVVYGKKGDTVELTCTASQKKNIQFHWKNSNQIKILGNQGSFLTKGPSKLNDRVDSRRSLWDQGNFPLIIKNLKPEDSDTYICEVEDQKEEVQLVVVGGGGSGKKVVYGKKGDTVELTCTASQKKNIQFHWKNSNQIKILGNQGSFLTKGPSKLNDRVDSRRSLWDQGNFPLIIKNLKPEDSDTYICEVEDQKEEVQLVVVGGSDKTHTCPPCPAPEAAGGPSVFLFPPKPKDTLMISRTPEVTCVVVDVSHEDPEVKFNWYVDGVEVHNAKTKPREEQYNSTYRVVSVLTVLHQDWLNGKEYKCKVSNKALPASIEKTISKAKGQPREPQVYTLPPSREEMTKNQVSLSCAVKGFYPSDIAVEWESNGQPENNYKTTPPVLDSDGSFFLVSKLTVDKSRWQQGNVFSCSVMHEALHNRYTQKSLSLSPGK

SEQ ID NO: 767 - protein, 455 aa, synthetic construct; identical to SEQ ID NO: 756
  REGION 1..455: note = Description of Artificial Sequence: Synthetic polypeptide

SEQ ID NO: 768 - protein, 455 aa, synthetic construct; identical to SEQ ID NO: 757
  REGION 1..455: note = Description of Artificial Sequence: Synthetic polypeptide

SEQ ID NO: 769 - protein, 432 aa, synthetic construct
  REGION 1..432: note = Description of Artificial Sequence: Synthetic polypeptide
KKVVYGKKGDTVELTCTASQKKNIQFHWKNSNQIKILGNQGSFLTKGPSKLNDRVDSRRSLWDQGNFPLIIKNLKPEDSDTYICEVEDQKEEVQLVVVGGGGSGKKVVYGKKGDTVELTCTASQKKNIQFHWKNSNQIKILGNQGSFLTKGPSKLNDRVDSRRSLWDQGNFPLIIKNLKPEDSDTYICEVEDQKEEVQLVVVGGSDKTHTCPPCPAPEAAGGPSVFLFPPKPKDTLMISRTPEVTCVVVDVSHEDPEVKFNWYVDGVEVHNAKTKPREEQYNSTYRVVSVLTVLHQDWLNGKEYKCKVSNKALPASIEKTISKAKGQPREPQVYTLPPSREEMTKNQVSLSCAVKGFYPSDIAVEWESNGQPENNYKTTPPVLDSDGSFFLVSKLTVDKSRWQQGNVFSCSVMHEALHNHYTQKSLSLSPGK

SEQ ID NO: 770 - protein, 432 aa, synthetic construct
  REGION 1..432: note = Description of Artificial Sequence: Synthetic polypeptide
KKVVYGKKGDTVELTCTASQKKNIQFHWKNSNQIKILGNQGSFLTKGPSKLNDRVDSRRSLWDQGNFPLIIKNLKPEDSDTYICEVEDQKEEVQLVVVGGGGSGKKVVYGKKGDTVELTCTASQKKNIQFHWKNSNQIKILGNQGSFLTKGPSKLNDRVDSRRSLWDQGNFPLIIKNLKPEDSDTYICEVEDQKEEVQLVVVGGSDKTHTCPPCPAPEAAGGPSVFLFPPKPKDTLYITREPEVTCVVVDVSHEDPEVKFNWYVDGVEVHNAKTKPREEQYNSTYRVVSVLTVLHQDWLNGKEYKCKVSNKALPASIEKTISKAKGQPREPQVYTLPPSREEMTKNQVSLSCAVKGFYPSDIAVEWESNGQPENNYKTTPPVLDSDGSFFLVSKLTVDKSRWQQGNVFSCSVMHEALHNHYTQKSLSLSPGK

SEQ ID NO: 771 - protein, 455 aa, synthetic construct; identical to SEQ ID NO: 760
  REGION 1..455: note = Description of Artificial Sequence: Synthetic polypeptide

SEQ ID NO: 772 - protein, 432 aa, synthetic construct
  REGION 1..432: note = Description of Artificial Sequence: Synthetic polypeptide
KKVVYGKKGDTVELTCTASQKKNIQFHWKNSNQIKILGNQGSFLTKGPSKLNDRVDSRRSLWDQGNFPLIIKNLKPEDSDTYICEVEDQKEEVQLVVVGGGGSGKKVVYGKKGDTVELTCTASQKKNIQFHWKNSNQIKILGNQGSFLTKGPSKLNDRVDSRRSLWDQGNFPLIIKNLKPEDSDTYICEVEDQKEEVQLVVVGGSDKTHTCPPCPAPEAAGGPSVFLFPPKPKDTLMISRTPEVTCVVVDVSHEDPEVKFNWYVDGVEVHNAKTKPREEQYNSTYRVVSVLTVLHQDWLNGKEYKCKVSNKALPASIEKTISKAKGQPREPQVYTLPPSREEMTKNQVSLWCLVKGFYPSDIAVEWESNGQPENNYKTTPPVLDSDGSFFLYSKLTVDKSRWQQGNVFSCSVLHEALHSHYTQKSLSLSPGK

SEQ ID NO: 773 - protein, 486 aa, synthetic construct
  REGION 1..486: note = Description of Artificial Sequence: Synthetic polypeptide
EVQLVESGGGLVQPGGSLRLSCAASGFTFNTYAMNWVRQAPGKGLEWVGRIRSKYNNYATYYAASVKGRFTISRDDSKNSLYLQMNSLKTEDTAMYYCVRHGNFGNSYVSWFAYWGQGTLVTVSSGGGGSGGGGSGGGGSGGGGSQAVVTQEPSLTVSPGGTVTLTCGSSTGAVTTGHYANWVQQKPGQAPRGLIGGTNKRAPWTPARFSGSLLGGKAALTLSGAQPEDEAEYYCALWYSNLWVFGGGTKLTVLEPKSSDKTHTCPPCPAPEAAGGPSVFLFPPKPKDTLMISRTPEVTCVVVDVSHEDPEVKFNWYVDGVEVHNAKTKPREEQYNSTYRVVSVLTVLHQDWLNGKEYKCKVSNKALPASIEKTISKAKGQPREPQVYTLPPSREEMTKNQVSLSCAVKGFYPSDIAVEWESNGQPENNYKTTPPVLDSDGSFFLVSKLTVDKSRWQQGNVFSCSVMHEALHNRYTQKSLSLSPGK

SEQ ID NO: 774 - protein, 486 aa, synthetic construct; identical to SEQ ID NO: 773
  REGION 1..486: note = Description of Artificial Sequence: Synthetic polypeptide

SEQ ID NO: 775 - protein, 436 aa, synthetic construct
  REGION 1..436: note = Description of Artificial Sequence: Synthetic polypeptide
KKVVYGKKGDTVELTCTASQKKNIQFHWKNSNQIKILGNQGSFLTKGPSKLNDRVDSRRSLWDQGNFPLIIKNLKPEDSDTYICEVEDQKEEVQLVVVGGGGSGSSASTKGPSVFPLAPSSKSTSGGTAALGCLVKDYFPEPVTVSWNSGALTSGVHTFPAVLQSSGLYSLSSVVTVPSSSLGTQTYICNVNHKPSNTKVDKKVEPKSCDKTHTCPPCPAPEAAGGPSVFLFPPKPKDTLMISRTPEVTCVVVDVSHEDPEVKFNWYVDGVEVHNAKTKPREEQYNSTYRVVSVLTVLHQDWLNGKEYKCKVSNKALPASIEKTISKAKGQPREPQVYTLPPSREEMTKNQVSLWCLVKGFYPSDIAVEWESNGQPENNYKTTPPVLDSDGSFFLYSKLTVDKSRWQQGNVFSCSVLHEALHSHYTQKSLSLSPGK

SEQ ID NO: 776 - protein, 212 aa, synthetic construct
  REGION 1..212: note = Description of Artificial Sequence: Synthetic polypeptide
KKVVYGKKGDTVELTCTASQKKNIQFHWKNSNQIKILGNQGSFLTKGPSKLNDRVDSRRSLWDQGNFPLIIKNLKPEDSDTYICEVEDQKEEVQLVVVGGGGSGKRTVAAPSVFIFPPSDEQLKSGTASVVCLLNNFYPREAKVQWKVDNALQSGNSQESVTEQDSKDSTYSLSSTLTLSKADYEKHKVYACEVTHQGLSSPVTKSFNRGEC

SEQ ID NO: 777 - protein, 486 aa, synthetic construct
  REGION 1..486: note = Description of Artificial Sequence: Synthetic polypeptide
EVQLVESGGGLVQPGGSLRLSCAASGFTFNTYAMNWVRQAPGKGLEWVGRIRSKYNNYATYYADSVKGRFTISRDDSKNSLYLQMNSLRTEDTAVYYCVRHGNFGHSYVSWFAYWGQGTLVTVSSGGGGSGGGGSGGGGSGGGGSQAVVTQEPSLTVSPGGTVTLTCGSSTGAVTTGHYANWVQQKPGQAPRGLIGGTSNRAPGVPARFSGSLLGGKAALTISGAQPEDEAEYYCALWYSNRWVFGGGTKLTVLEPKSSDKTHTCPPCPAPEAAGGPSVFLFPPKPKDTLYITREPEVTCVVVDVSHEDPEVKFNWYVDGVEVHNAKTKPREEQYNSTYRVVSVLTVLHQDWLNGKEYKCKVSNKALPASIEKTISKAKGQPREPQVYTLPPSREEMTKNQVSLWCLVKGFYPSDIAVEWESNGQPENNYKTTPPVLDSDGSFFLYSKLTVDKSRWQQGNVFSCSVMHEALHNHYTQKSLSLSPGK

SEQ ID NO: 778 - protein, 436 aa, synthetic construct
  REGION 1..436: note = Description of Artificial Sequence: Synthetic polypeptide
KKVVYGKKGDTVELTCTASQKKNIQFHWKNSNQIKILGNQGSFLTKGPSKLNDRVDSRRSLWDQGNFPLIIKNLKPEDSDTYICEVEDQKEEVQLVVVGGGGSGSSASTKGPSVFPLAPSSKSTSGGTAALGCLVKDYFPEPVTVSWNSGALTSGVHTFPAVLQSSGLYSLSSVVTVPSSSLGTQTYICNVNHKPSNTKVDKKVEPKSCDKTHTCPPCPAPEAAGGPSVFLFPPKPKDTLMISRTPEVTCVVVDVSHEDPEVKFNWYVDGVEVHNAKTKPREEQYNSTYRVVSVLTVLHQDWLNGKEYKCKVSNKALPASIEKTISKAKGQPREPQVYTLPPSREEMTKNQVSLSCAVKGFYPSDIAVEWESNGQPENNYKTTPPVLDSDGSFFLVSKLTVDKSRWQQGNVFSCSVMHEALHNRYTQKSLSLSPGK

SEQ ID NO: 779 - protein, 486 aa, synthetic construct
  REGION 1..486: note = Description of Artificial Sequence: Synthetic polypeptide
EVQLVESGGGLVQPGGSLRLSCAASGFTFNTYAMNWVRQAPGKGLEWVGRIRSKYNNYATYYADSVKGRFTISRDDSKNSLYLQMNSLRTEDTAVYYCVRHGNFGHSYVSWFAYWGQGTLVTVSSGGGGSGGGGSGGGGSGGGGSQAVVTQEPSLTVSPGGTVTLTCGSSTGAVTTGHYANWVQQKPGQAPRGLIGGTSNRAPGVPARFSGSLLGGKAALTISGAQPEDEAEYYCALWYSNRWVFGGGTKLTVLEPKSSDKTHTCPPCPAPEAAGGPSVFLFPPKPKDTLMISRTPEVTCVVVDVSHEDPEVKFNWYVDGVEVHNAKTKPREEQYNSTYRVVSVLTVLHQDWLNGKEYKCKVSNKALPASIEKTISKAKGQPREPQVYTLPPSREEMTKNQVSLWCLVKGFYPSDIAVEWESNGQPENNYKTTPPVLDSDGSFFLYSKLTVDKSRWQQGNVFSCSVMHEALHNHYTQKSLSLSPGK

SEQ ID NO: 780 - protein, 436 aa, synthetic construct
  REGION 1..436: note = Description of Artificial Sequence: Synthetic polypeptide
KKVVYGKKGDTVELTCTASQKKNIQFHWKNSNQIKILGNQGSFLTKGPSKLNDRVDSRRSLWDQGNFPLIIKNLKPEDSDTYICEVEDQKEEVQLVVVGGGGSGSSASTKGPSVFPLAPSSKSTSGGTAALGCLVKDYFPEPVTVSWNSGALTSGVHTFPAVLQSSGLYSLSSVVTVPSSSLGTQTYICNVNHKPSNTKVDKKVEPKSCDKTHTCPPCPAPEAAGGPSVFLFPPKPKDTLMISRTPEVTCVVVDVSHEDPEVKFNWYVDGVEVHNAKTKPREEQYNSTYRVVSVLTVLHQDWLNGKEYKCKVSNKALPASIEKTISKAKGQPREPQVYTLPPSREEMTKNQVSLSCAVKGFYPSDIAVEWESNGQPENNYKTTPPVLDSDGSFFLVSKLTVDKSRWQQGNVFSCSVMHEALHNHYTQKSLSLSPGK

SEQ ID NO: 781 - protein, 436 aa, synthetic construct
  REGION 1..436: note = Description of Artificial Sequence: Synthetic polypeptide
KKVVYGKKGDTVELTCTASQKKNIQFHWKNSNQIKILGNQGSFLTKGPSKLNDRVDSRRSLWDQGNFPLIIKNLKPEDSDTYICEVEDQKEEVQLVVVGGGGSGSSASTKGPSVFPLAPSSKSTSGGTAALGCLVKDYFPEPVTVSWNSGALTSGVHTFPAVLQSSGLYSLSSVVTVPSSSLGTQTYICNVNHKPSNTKVDKKVEPKSCDKTHTCPPCPAPEAAGGPSVFLFPPKPKDTLYITREPEVTCVVVDVSHEDPEVKFNWYVDGVEVHNAKTKPREEQYNSTYRVVSVLTVLHQDWLNGKEYKCKVSNKALPASIEKTISKAKGQPREPQVYTLPPSREEMTKNQVSLSCAVKGFYPSDIAVEWESNGQPENNYKTTPPVLDSDGSFFLVSKLTVDKSRWQQGNVFSCSVMHEALHNHYTQKSLSLSPGK

SEQ ID NO: 782 - protein, 407 aa, synthetic construct
  REGION 1..407: note = Description of Artificial Sequence: Synthetic polypeptide
KKVVLGKKGDTVELTCTASQKKSIQFHWKNSNQIKILGNQGSFLTKGPSKLNDRADSRRSLWDQGNFPLIIKNLKIEDSDTYICEVEDQKEEVQLLVFGLTANSDTHLLQGQSLTLTLESPPGSSPSVQCRSPRGKNIQGGKTLSVSQLELQDSGTWTCTVLQNQKKVEFKIDIVVLAGSDKTHTCPPCPAPEAAGGPSVFLFPPKPKDTLYITREPEVTCVVVDVSHEDPEVKFNWYVDGVEVHNAKTKPREEQYNSTYRVVSVLTVLHQDWLNGKEYKCKVSNKALPASIEKTISKAKGQPREPQVYTLPPSREEMTKNQVSLWCLVKGFYPSDIAVEWESNGQPENNYKTTPPVLDSDGSFFLYSKLTVDKSRWQQGNVFSCSVMHEALHNHYTQKSLSLSPGK

SEQ ID NO: 783 - protein, 407 aa, synthetic construct
  REGION 1..407: note = Description of Artificial Sequence: Synthetic polypeptide
KKVVLGKKGDTVELTCTASQKKSIQFHWKNSNQIKILGNQGSFLTKGPSKLNDRADSRRSLWDQGNFPLIIKNLKIEDSDTYICEVEDQKEEVQLLVFGLTANSDTHLLQGQSLTLTLESPPGSSPSVQCRSPRGKNIQGGKTLSVSQLELQDSGTWTCTVLQNQKKVEFKIDIVVLAGSDKTHTCPPCPAPEAAGGPSVFLFPPKPKDTLMISRTPEVTCVVVDVSHEDPEVKFNWYVDGVEVHNAKTKPREEQYNSTYRVVSVLTVLHQDWLNGKEYKCKVSNKALPASIEKTISKAKGQPREPQVYTLPPSREEMTKNQVSLWCLVKGFYPSDIAVEWESNGQPENNYKTTPPVLDSDGSFFLYSKLTVDKSRWQQGNVFSCSVMHEALHNHYTQKSLSLSPGK

SEQ ID NO: 784 - protein, 407 aa, synthetic construct
  REGION 1..407: note = Description of Artificial Sequence: Synthetic polypeptide
KKVVLGKKGDTVELTCTASQKKSIQFHWKNSNQIKILGNQGSFLTKGPSKLNDRADSRRSLWDQGNFPLIIKNLKIEDSDTYICEVEDQKEEVQLLVFGLTANSDTHLLQGQSLTLTLESPPGSSPSVQCRSPRGKNIQGGKTLSVSQLELQDSGTWTCTVLQNQKKVEFKIDIVVLAGSDKTHTCPPCPAPEAAGGPSVFLFPPKPKDTLMISRTPEVTCVVVDVSHEDPEVKFNWYVDGVEVHNAKTKPREEQYNSTYRVVSVLTVLHQDWLNGKEYKCKVSNKALPASIEKTISKAKGQPREPQVYTLPPSREEMTKNQVSLSCAVKGFYPSDIAVEWESNGQPENNYKTTPPVLDSDGSFFLVSKLTVDKSRWQQGNVFSCSVMHEALHNRYTQKSLSLSPGK

SEQ ID NO: 785 - protein, 455 aa, synthetic construct; identical to SEQ ID NO: 756
  REGION 1..455: note = Description of Artificial Sequence: Synthetic polypeptide

SEQ ID NO: 786 - protein, 455 aa, synthetic construct; identical to SEQ ID NO: 757
  REGION 1..455: note = Description of Artificial Sequence: Synthetic polypeptide

SEQ ID NO: 787 - protein, 407 aa, synthetic construct
  REGION 1..407: note = Description of Artificial Sequence: Synthetic polypeptide
KKVVLGKKGDTVELTCTASQKKSIQFHWKNSNQIKILGNQGSFLTKGPSKLNDRADSRRSLWDQGNFPLIIKNLKIEDSDTYICEVEDQKEEVQLLVFGLTANSDTHLLQGQSLTLTLESPPGSSPSVQCRSPRGKNIQGGKTLSVSQLELQDSGTWTCTVLQNQKKVEFKIDIVVLAGSDKTHTCPPCPAPEAAGGPSVFLFPPKPKDTLMISRTPEVTCVVVDVSHEDPEVKFNWYVDGVEVHNAKTKPREEQYNSTYRVVSVLTVLHQDWLNGKEYKCKVSNKALPASIEKTISKAKGQPREPQVYTLPPSREEMTKNQVSLSCAVKGFYPSDIAVEWESNGQPENNYKTTPPVLDSDGSFFLVSKLTVDKSRWQQGNVFSCSVMHEALHNHYTQKSLSLSPGK

SEQ ID NO: 788 - protein, 407 aa, synthetic construct
  REGION 1..407: note = Description of Artificial Sequence: Synthetic polypeptide
KKVVLGKKGDTVELTCTASQKKSIQFHWKNSNQIKILGNQGSFLTKGPSKLNDRADSRRSLWDQGNFPLIIKNLKIEDSDTYICEVEDQKEEVQLLVFGLTANSDTHLLQGQSLTLTLESPPGSSPSVQCRSPRGKNIQGGKTLSVSQLELQDSGTWTCTVLQNQKKVEFKIDIVVLAGSDKTHTCPPCPAPEAAGGPSVFLFPPKPKDTLYITREPEVTCVVVDVSHEDPEVKFNWYVDGVEVHNAKTKPREEQYNSTYRVVSVLTVLHQDWLNGKEYKCKVSNKALPASIEKTISKAKGQPREPQVYTLPPSREEMTKNQVSLSCAVKGFYPSDIAVEWESNGQPENNYKTTPPVLDSDGSFFLVSKLTVDKSRWQQGNVFSCSVMHEALHNHYTQKSLSLSPGK

SEQ ID NO: 789 - protein, 455 aa, synthetic construct; identical to SEQ ID NO: 760
  REGION 1..455: note = Description of Artificial Sequence: Synthetic polypeptide

SEQ ID NO: 790 - protein, 407 aa, synthetic construct
  REGION 1..407: note = Description of Artificial Sequence: Synthetic polypeptide
KKVVLGKKGDTVELTCTASQKKSIQFHWKNSNQIKILGNQGSFLTKGPSKLNDRADSRRSLWDQGNFPLIIKNLKIEDSDTYICEVEDQKEEVQLLVFGLTANSDTHLLQGQSLTLTLESPPGSSPSVQCRSPRGKNIQGGKTLSVSQLELQDSGTWTCTVLQNQKKVEFKIDIVVLAGSDKTHTCPPCPAPEAAGGPSVFLFPPKPKDTLMISRTPEVTCVVVDVSHEDPEVKFNWYVDGVEVHNAKTKPREEQYNSTYRVVSVLTVLHQDWLNGKEYKCKVSNKALPASIEKTISKAKGQPREPQVYTLPPSREEMTKNQVSLWCLVKGFYPSDIAVEWESNGQPENNYKTTPPVLDSDGSFFLYSKLTVDKSRWQQGNVFSCSVLHEALHSHYTQKSLSLSPGK

SEQ ID NO: 791 - protein, 486 aa, synthetic construct; identical to SEQ ID NO: 773
  REGION 1..486: note = Description of Artificial Sequence: Synthetic polypeptide

SEQ ID NO: 792 - protein, 486 aa, synthetic construct; identical to SEQ ID NO: 773
  REGION 1..486: note = Description of Artificial Sequence: Synthetic polypeptide

SEQ ID NO: 793 - protein, 515 aa, synthetic construct
  REGION 1..515: note = Description of Artificial Sequence: Synthetic polypeptide
KKVVLGKKGDTVELTCTASQKKSIQFHWKNSNQIKILGNQGSFLTKGPSKLNDRADSRRSLWDQGNFPLIIKNLKIEDSDTYICEVEDQKEEVQLLVFGLTANSDTHLLQGQSLTLTLESPPGSSPSVQCRSPRGKNIQGGKTLSVSQLELQDSGTWTCTVLQNQKKVEFKIDIVVLAGGGSGSSASTKGPSVFPLAPSSKSTSGGTAALGCLVKDYFPEPVTVSWNSGALTSGVHTFPAVLQSSGLYSLSSVVTVPSSSLGTQTYICNVNHKPSNTKVDKKVEPKSCDKTHTCPPCPAPEAAGGPSVFLFPPKPKDTLMISRTPEVTCVVVDVSHEDPEVKFNWYVDGVEVHNAKTKPREEQYNSTYRVVSVLTVLHQDWLNGKEYKCKVSNKALPASIEKTISKAKGQPREPQVYTLPPSREEMTKNQVSLWCLVKGFYPSDIAVEWESNGQPENNYKTTPPVLDSDGSFFLYSKLTVDKSRWQQGNVFSCSVLHEALHSHYTQKSLSLSPGK

SEQ ID NO: 794 - protein, 291 aa, synthetic construct
  REGION 1..291: note = Description of Artificial Sequence: Synthetic polypeptide
KKVVLGKKGDTVELTCTASQKKSIQFHWKNSNQIKILGNQGSFLTKGPSKLNDRADSRRSLWDQGNFPLIIKNLKIEDSDTYICEVEDQKEEVQLLVFGLTANSDTHLLQGQSLTLTLESPPGSSPSVQCRSPRGKNIQGGKTLSVSQLELQDSGTWTCTVLQNQKKVEFKIDIVVLAGGGSGKRTVAAPSVFIFPPSDEQLKSGTASVVCLLNNFYPREAKVQWKVDNALQSGNSQESVTEQDSKDSTYSLSSTLTLSKADYEKHKVYACEVTHQGLSSPVTKSFNRGEC

SEQ ID NO: 795 - protein, 486 aa, synthetic construct; identical to SEQ ID NO: 777
  REGION 1..486: note = Description of Artificial Sequence: Synthetic polypeptide

SEQ ID NO: 796 - protein, 515 aa, synthetic construct
  REGION 1..515: note = Description of Artificial Sequence: Synthetic polypeptide
KKVVLGKKGDTVELTCTASQKKSIQFHWKNSNQIKILGNQGSFLTKGPSKLNDRADSRRSLWDQGNFPLIIKNLKIEDSDTYICEVEDQKEEVQLLVFGLTANSDTHLLQGQSLTLTLESPPGSSPSVQCRSPRGKNIQGGKTLSVSQLELQDSGTWTCTVLQNQKKVEFKIDIVVLAGGGSGSSASTKGPSVFPLAPSSKSTSGGTAALGCLVKDYFPEPVTVSWNSGALTSGVHTFPAVLQSSGLYSLSSVVTVPSSSLGTQTYICNVNHKPSNTKVDKKVEPKSCDKTHTCPPCPAPEAAGGPSVFLFPPKPKDTLMISRTPEVTCVVVDVSHEDPEVKFNWYVDGVEVHNAKTKPREEQYNSTYRVVSVLTVLHQDWLNGKEYKCKVSNKALPASIEKTISKAKGQPREPQVYTLPPSREEMTKNQVSLSCAVKGFYPSDIAVEWESNGQPENNYKTTPPVLDSDGSFFLVSKLTVDKSRWQQGNVFSCSVMHEALHNRYTQKSLSLSPGK

SEQ ID NO: 797 - protein, 486 aa, synthetic construct; identical to SEQ ID NO: 779
  REGION 1..486: note = Description of Artificial Sequence: Synthetic polypeptide

SEQ ID NO: 798 - protein, 515 aa, synthetic construct
  REGION 1..515: note = Description of Artificial Sequence: Synthetic polypeptide
KKVVLGKKGDTVELTCTASQKKSIQFHWKNSNQIKILGNQGSFLTKGPSKLNDRADSRRSLWDQGNFPLIIKNLKIEDSDTYICEVEDQKEEVQLLVFGLTANSDTHLLQGQSLTLTLESPPGSSPSVQCRSPRGKNIQGGKTLSVSQLELQDSGTWTCTVLQNQKKVEFKIDIVVLAGGGSGSSASTKGPSVFPLAPSSKSTSGGTAALGCLVKDYFPEPVTVSWNSGALTSGVHTFPAVLQSSGLYSLSSVVTVPSSSLGTQTYICNVNHKPSNTKVDKKVEPKSCDKTHTCPPCPAPEAAGGPSVFLFPPKPKDTLMISRTPEVTCVVVDVSHEDPEVKFNWYVDGVEVHNAKTKPREEQYNSTYRVVSVLTVLHQDWLNGKEYKCKVSNKALPASIEKTISKAKGQPREPQVYTLPPSREEMTKNQVSLSCAVKGFYPSDIAVEWESNGQPENNYKTTPPVLDSDGSFFLVSKLTVDKSRWQQGNVFSCSVMHEALHNHYTQKSLSLSPGK

SEQ ID NO: 799 - protein, 515 aa, synthetic construct
  REGION 1..515: note = Description of Artificial Sequence: Synthetic polypeptide
KKVVLGKKGDTVELTCTASQKKSIQFHWKNSNQIKILGNQGSFLTKGPSKLNDRADSRRSLWDQGNFPLIIKNLKIEDSDTYICEVEDQKEEVQLLVFGLTANSDTHLLQGQSLTLTLESPPGSSPSVQCRSPRGKNIQGGKTLSVSQLELQDSGTWTCTVLQNQKKVEFKIDIVVLAGGGSGSSASTKGPSVFPLAPSSKSTSGGTAALGCLVKDYFPEPVTVSWNSGALTSGVHTFPAVLQSSGLYSLSSVVTVPSSSLGTQTYICNVNHKPSNTKVDKKVEPKSCDKTHTCPPCPAPEAAGGPSVFLFPPKPKDTLYITREPEVTCVVVDVSHEDPEVKFNWYVDGVEVHNAKTKPREEQYNSTYRVVSVLTVLHQDWLNGKEYKCKVSNKALPASIEKTISKAKGQPREPQVYTLPPSREEMTKNQVSLSCAVKGFYPSDIAVEWESNGQPENNYKTTPPVLDSDGSFFLVSKLTVDKSRWQQGNVFSCSVMHEALHNHYTQKSLSLSPGK

SEQ ID NO: 800 - protein, 486 aa, synthetic construct; identical to SEQ ID NO: 777
  REGION 1..486: note = Description of Artificial Sequence: Synthetic polypeptide

SEQ ID NO: 801 - protein, 453 aa, synthetic construct
  REGION 1..453: note = Description of Artificial Sequence: Synthetic polypeptide
QVQLLQSGAAVTKPGASVRVSCEASGYNIRDYFIHWWRQAPGQGLQWVGWINPKTGQPNNPRQFQGRVSLTRHASFDFDTFSFYMDLKALRSDDTAVYFCARQRSDYWDFDVWGSGTQVTVSSASTKGPSVFPLAPSSKSTSGGTAALGCLVKDYFPEPVTVSWNSGALTSGVHTFPAVLQSSGLYSLSSVVTVPSSSLGTQTYICNVNHKPSNTKVDKKVEPKSCDKTHTCPPCPAPEAAGGPSVFLFPPKPKDTLYITREPEVTCVVVDVSHEDPEVKFNWYVDGVEVHNAKTKPREEQYNSTYRVVSVLTVLHQDWLNGKEYKCKVSNKALPASIEKTISKAKGQPREPQVYTLPPSREEMTKNQVSLSCAVKGFYPSDIAVEWESNGQPENNYKTTPPVLDSDGSFFLVSKLTVDKSRWQQGNVFSCSVMHEALHNHYTQKSLSLSPGK

SEQ ID NO: 802 - protein, 206 aa, synthetic construct
  REGION 1..206: note = Description of Artificial Sequence: Synthetic polypeptide
DIQMTQSPSSLSASVGDTATITCQANGYLNWYQQRRGKAPKLLIYDGSKLERGVPSRFSGRRWGQEYNLTINNLQPEDIATYFCQVYEFVVPGTRLDLKRTVAAPSVFIFPPSDEQLKSGTASVVCLLNNFYPREAKVQWKVDNALQSGNSQESVTEQDSKDSTYSLSSTLTLSKADYEKHKVYACEVTHQGLSSPVTKSFNRGEC

SEQ ID NO: 803 - protein, 453 aa, synthetic construct
  REGION 1..453: note = Description of Artificial Sequence: Synthetic polypeptide
QVQLLQSGAAVTKPGASVRVSCEASGYNIRDYFIHWWRQAPGQGLQWVGWINPKTGQPNNPRQFQGRVSLTRHASFDFDTFSFYMDLKALRSDDTAVYFCARQRSDYWDFDVWGSGTQVTVSSASTKGPSVFPLAPSSKSTSGGTAALGCLVKDYFPEPVTVSWNSGALTSGVHTFPAVLQSSGLYSLSSVVTVPSSSLGTQTYICNVNHKPSNTKVDKKVEPKSCDKTHTCPPCPAPEAAGGPSVFLFPPKPKDTLMISRTPEVTCVVVDVSHEDPEVKFNWYVDGVEVHNAKTKPREEQYNSTYRVVSVLTVLHQDWLNGKEYKCKVSNKALPASIEKTISKAKGQPREPQVYTLPPSREEMTKNQVSLSCAVKGFYPSDIAVEWESNGQPENNYKTTPPVLDSDGSFFLVSKLTVDKSRWQQGNVFSCSVMHEALHNRYTQKSLSLSPGK

SEQ ID NO: 804 - protein, 486 aa, synthetic construct; identical to SEQ ID NO: 779
  REGION 1..486: note = Description of Artificial Sequence: Synthetic polypeptide

SEQ ID NO: 805 - protein, 453 aa, synthetic construct
  REGION 1..453: note = Description of Artificial Sequence: Synthetic polypeptide
QVQLLQSGAAVTKPGASVRVSCEASGYNIRDYFIHWWRQAPGQGLQWVGWINPKTGQPNNPRQFQGRVSLTRHASFDFDTFSFYMDLKALRSDDTAVYFCARQRSDYWDFDVWGSGTQVTVSSASTKGPSVFPLAPSSKSTSGGTAALGCLVKDYFPEPVTVSWNSGALTSGVHTFPAVLQSSGLYSLSSVVTVPSSSLGTQTYICNVNHKPSNTKVDKKVEPKSCDKTHTCPPCPAPEAAGGPSVFLFPPKPKDTLMISRTPEVTCVVVDVSHEDPEVKFNWYVDGVEVHNAKTKPREEQYNSTYRVVSVLTVLHQDWLNGKEYKCKVSNKALPASIEKTISKAKGQPREPQVYTLPPSREEMTKNQVSLSCAVKGFYPSDIAVEWESNGQPENNYKTTPPVLDSDGSFFLVSKLTVDKSRWQQGNVFSCSVMHEALHNHYTQKSLSLSPGK

SEQ ID NO: 806 - protein, 486 aa, synthetic construct
  REGION 1..486: note = Description of Artificial Sequence: Synthetic polypeptide
EVQLVESGGGLVQPGGSLRLSCAASGFTFNTYAMNWVRQAPGKGLEWVGRIRSKYNNYATYYADSVKSRFTISRDDSKNSLYLEMNSLRTEDTAVYYCVRHGNFGHSYVSWFAYWGQGTLVTVSSGGGGSGGGGSGGGGSGGGGSQAVVTQEPSLTVSPGGTVTLTCGSSTGAVTTGHYANWVQQKPGQAPRGLIGGTSNRAPGVPARFSGSLLGGKAALTISGAQPEDEAEYYCALWYSNRWVFGGGTKLTVLEPKSSDKTHTCPPCPAPEAAGGPSVFLFPPKPKDTLYITREPEVTCVVVDVSHEDPEVKFNWYVDGVEVHNAKTKPREEQYNSTYRVVSVLTVLHQDWLNGKEYKCKVSNKALPASIEKTISKAKGQPREPQVYTLPPSREEMTKNQVSLWCLVKGFYPSDIAVEWESNGQPENNYKTTPPVLDSDGSFFLYSKLTVDKSRWQQGNVFSCSVMHEALHNHYTQKSLSLSPGK

SEQ ID NO: 807 - protein, 486 aa, synthetic construct
  REGION 1..486: note = Description of Artificial Sequence: Synthetic polypeptide
EVQLVESGGGLVQPGGSLRLSCAASGFTFNTYAMNWVRQAPGKGLEWVGRIRSKYNNYATYYADSVKSRFTISRDDSKNSLYLEMNSLRTEDTAVYYCVRHGNFGHSYVSWFAYWGQGTLVTVSSGGGGSGGGGSGGGGSGGGGSQAVVTQEPSLTVSPGGTVTLTCGSSTGAVTTGHYANWVQQKPGQAPRGLIGGTSNRAPGVPARFSGSLLGGKAALTISGAQPEDEAEYYCALWYSNRWVFGGGTKLTVLEPKSSDKTHTCPPCPAPEAAGGPSVFLFPPKPKDTLMISRTPEVTCVVVDVSHEDPEVKFNWYVDGVEVHNAKTKPREEQYNSTYRVVSVLTVLHQDWLNGKEYKCKVSNKALPASIEKTISKAKGQPREPQVYTLPPSREEMTKNQVSLWCLVKGFYPSDIAVEWESNGQPENNYKTTPPVLDSDGSFFLYSKLTVDKSRWQQGNVFSCSVMHEALHNHYTQKSLSLSPGK

SEQ ID NO: 808 - protein, 486 aa, synthetic construct
  REGION 1..486: note = Description of Artificial Sequence: Synthetic polypeptide
EVQLVESGGGLVQPGGSLRLSCAASGFTFNTYAMNWVRQAPGKGLEWVGRIRSKYNNYATYYADSVKSRFTISRDDSKNSLYLEMNSLRTEDTAVYYCVRHGNFGHSYVSWFAYWGQGTLVTVSSGGGGSGGGGSGGGGSGGGGSQAVVTQEPSLTVSPGGTVTLTCGSSTGAVTTGHYANWVQQKPGQAPRGLIGGTSNRAPGVPARFSGSLLGGKAALTISGAQPEDEAEYYCALWYSNRWVFGGGTKLTVLEPKSSDKTHTCPPCPAPEAAGGPSVFLFPPKPKDTLMISRTPEVTCVVVDVSHEDPEVKFNWYVDGVEVHNAKTKPREEQYNSTYRVVSVLTVLHQDWLNGKEYKCKVSNKALPASIEKTISKAKGQPREPQVYTLPPSREEMTKNQVSLSCAVKGFYPSDIAVEWESNGQPENNYKTTPPVLDSDGSFFLVSKLTVDKSRWQQGNVFSCSVMHEALHNRYTQKSLSLSPGK

SEQ ID NO: 809 - protein, 453 aa, synthetic construct
  REGION 1..453: note = Description of Artificial Sequence: Synthetic polypeptide
QVQLLQSGAAVTKPGASVRVSCEASGYNIRDYFIHWWRQAPGQGLQWVGWINPKTGQPNNPRQFQGRVSLTRHASFDFDTFSFYMDLKALRSDDTAVYFCARQRSDYWDFDVWGSGTQVTVSSASTKGPSVFPLAPSSKSTSGGTAALGCLVKDYFPEPVTVSWNSGALTSGVHTFPAVLQSSGLYSLSSVVTVPSSSLGTQTYICNVNHKPSNTKVDKKVEPKSCDKTHTCPPCPAPEAAGGPSVFLFPPKPKDTLYITREPEVTCVVVDVSHEDPEVKFNWYVDGVEVHNAKTKPREEQYNSTYRVVSVLTVLHQDWLNGKEYKCKVSNKALPASIEKTISKAKGQPREPQVYTLPPSREEMTKNQVSLWCLVKGFYPSDIAVEWESNGQPENNYKTTPPVLDSDGSFFLYSKLTVDKSRWQQGNVFSCSVMHEALHNHYTQKSLSLSPGK

SEQ ID NO: 810 - protein, 453 aa, synthetic construct
  REGION 1..453: note = Description of Artificial Sequence: Synthetic polypeptide
QVQLLQSGAAVTKPGASVRVSCEASGYNIRDYFIHWWRQAPGQGLQWVGWINPKTGQPNNPRQFQGRVSLTRHASFDFDTFSFYMDLKALRSDDTAVYFCARQRSDYWDFDVWGSGTQVTVSSASTKGPSVFPLAPSSKSTSGGTAALGCLVKDYFPEPVTVSWNSGALTSGVHTFPAVLQSSGLYSLSSVVTVPSSSLGTQTYICNVNHKPSNTKVDKKVEPKSCDKTHTCPPCPAPEAAGGPSVFLFPPKPKDTLMISRTPEVTCVVVDVSHEDPEVKFNWYVDGVEVHNAKTKPREEQYNSTYRVVSVLTVLHQDWLNGKEYKCKVSNKALPASIEKTISKAKGQPREPQVYTLPPSREEMTKNQVSLWCLVKGFYPSDIAVEWESNGQPENNYKTTPPVLDSDGSFFLYSKLTVDKSRWQQGNVFSCSVMHEALHNHYTQKSLSLSPGK

SEQ ID NO: 811 - protein, 486 aa, synthetic construct
  REGION 1..486: note = Description of Artificial Sequence: Synthetic polypeptide
EVQLVESGGGLVQPGGSLRLSCAASGFTFNTYAMNWVRQAPGKGLEWVGRIRSKYNNYATYYAASVKGRFTISRDDSKNSLYLQMNSLKTEDTAMYYCVRHGNFGNSYVSWFAYWGQGTLVTVSSGGGGSGGGGSGGGGSGGGGSQAVVTQEPSLTVSPGGTVTLTCGSSTGAVTTGHYANWVQQKPGQAPRGLIGGTNKRAPWTPARFSGSLLGGKAALTLSGAQPEDEAEYYCALWYSNLWVFGGGTKLTVLEPKSSDKTHTCPPCPAPEAAGGPSVFLFPPKPKDTLYITREPEVTCVVVDVSHEDPEVKFNWYVDGVEVHNAKTKPREEQYNSTYRVVSVLTVLHQDWLNGKEYKCKVSNKALPASIEKTISKAKGQPREPQVYTLPPSREEMTKNQVSLWCLVKGFYPSDIAVEWESNGQPENNYKTTPPVLDSDGSFFLYSKLTVDKSRWQQGNVFSCSVMHEALHNHYTQKSLSLSPGK

SEQ ID NO: 812 - protein, 486 aa, synthetic construct; identical to SEQ ID NO: 773
  REGION 1..486: note = Description of Artificial Sequence: Synthetic polypeptide

SEQ ID NO: 813 - protein, 486 aa, synthetic construct
  REGION 1..486: note = Description of Artificial Sequence: Synthetic polypeptide
EVQLVESGGGLVQPGGSLRLSCAASGFTFNTYAMNWVRQAPGKGLEWVGRIRSKYNNYATYYAASVKGRFTISRDDSKNSLYLQMNSLKTEDTAMYYCVRHGNFGNSYVSWFAYWGQGTLVTVSSGGGGSGGGGSGGGGSGGGGSQAVVTQEPSLTVSPGGTVTLTCGSSTGAVTTGHYANWVQQKPGQAPRGLIGGTNKRAPWTPARFSGSLLGGKAALTLSGAQPEDEAEYYCALWYSNLWVFGGGTKLTVLEPKSSDKTHTCPPCPAPEAAGGPSVFLFPPKPKDTLMISRTPEVTCVVVDVSHEDPEVKFNWYVDGVEVHNAKTKPREEQYNSTYRVVSVLTVLHQDWLNGKEYKCKVSNKALPASIEKTISKAKGQPREPQVYTLPPSREEMTKNQVSLWCLVKGFYPSDIAVEWESNGQPENNYKTTPPVLDSDGSFFLYSKLTVDKSRWQQGNVFSCSVMHEALHNHYTQKSLSLSPGK

SEQ ID NO: 814 - protein, 453 aa, synthetic construct
  REGION 1..453: note = Description of Artificial Sequence: Synthetic polypeptide
QVQLLQSGAAVTKPGASVRVSCEASGYNIRDYFIHWWRQAPGQGLQWVGWINPKTGQPNNPRQFQGRVSLTRHASFDFDTFSFYMDLKALRSDDTAVYFCARQRSDYWDFDVWGSGTQVTVSSASTKGPSVFPLAPSSKSTSGGTAALGCLVKDYFPEPVTVSWNSGALTSGVHTFPAVLQSSGLYSLSSVVTVPSSSLGTQTYICNVNHKPSNTKVDKKVEPKSCDKTHTCPPCPAPEAAGGPSVFLFPPKPKDTLMISRTPEVTCVVVDVSHEDPEVKFNWYVDGVEVHNAKTKPREEQYNSTYRVVSVLTVLHQDWLNGKEYKCKVSNKALPASIEKTISKAKGQPREPQVYTLPPSREEMTKNQVSLWCLVKGFYPSDIAVEWESNGQPENNYKTTPPVLDSDGSFFLYSKLTVDKSRWQQGNVFSCSVLHEALHSHYTQKSLSLSPGK

SEQ ID NO: 815 - protein, 486 aa, synthetic construct
  REGION 1..486: note = Description of Artificial Sequence: Synthetic polypeptide
EVQLVESGGGLVQPGGSLRLSCAASGFTFNTYAMNWVRQAPGKGLEWVGRIRSKYNNYATYYADSVKGRFTISRDDSKNSLYLQMNSLRTEDTAVYYCVRHGNFGHSYVSWFAYWGQGTLVTVSSGGGGSGGGGSGGGGSGGGGSQAVVTQEPSLTVSPGGTVTLTCGSSTGAVTTGHYANWVQQKPGQAPRGLIGGTNKRAPGVPARFSGSLLGGKAALTISGAQPEDEAEYYCALWYSNRWVFGGGTKLTVLEPKSSDKTHTCPPCPAPEAAGGPSVFLFPPKPKDTLYITREPEVTCVVVDVSHEDPEVKFNWYVDGVEVHNAKTKPREEQYNSTYRVVSVLTVLHQDWLNGKEYKCKVSNKALPASIEKTISKAKGQPREPQVYTLPPSREEMTKNQVSLWCLVKGFYPSDIAVEWESNGQPENNYKTTPPVLDSDGSFFLYSKLTVDKSRWQQGNVFSCSVMHEALHNHYTQKSLSLSPGK

SEQ ID NO: 816 - protein, 486 aa, synthetic construct
  REGION 1..486: note = Description of Artificial Sequence: Synthetic polypeptide
EVQLVESGGGLVQPGGSLRLSCAASGFTFNTYAMNWVRQAPGKGLEWVGRIRSKYNNYATYYADSVKGRFTISRDDSKNSLYLQMNSLRTEDTAVYYCVRHGNFGHSYVSWFAYWGQGTLVTVSSGGGGSGGGGSGGGGSGGGGSQAVVTQEPSLTVSPGGTVTLTCGSSTGAVTTGHYANWVQQKPGQAPRGLIGGTNKRAPGVPARFSGSLLGGKAALTISGAQPEDEAEYYCALWYSNRWVFGGGTKLTVLEPKSSDKTHTCPPCPAPEAAGGPSVFLFPPKPKDTLMISRTPEVTCVVVDVSHEDPEVKFNWYVDGVEVHNAKTKPREEQYNSTYRVVSVLTVLHQDWLNGKEYKCKVSNKALPASIEKTISKAKGQPREPQVYTLPPSREEMTKNQVSLWCLVKGFYPSDIAVEWESNGQPENNYKTTPPVLDSDGSFFLYSKLTVDKSRWQQGNVFSCSVMHEALHNHYTQKSLSLSPGK

SEQ ID NO: 817 - protein, 486 aa, synthetic construct
  REGION 1..486: note = Description of Artificial Sequence: Synthetic polypeptide
EVQLVESGGGLVQPGGSLRLSCAASGFTFNTYAMNWVRQAPGKGLEWVGRIRSKYNNYATYYAASVKGRFTISRDDSKNSLYLQMNSLKTEDTAMYYCVRHGNFGHSYVSWFAYWGQGTLVTVSSGGGGSGGGGSGGGGSGGGGSQAVVTQEPSLTVSPGGTVTLTCGSSTGAVTTGHYANWVQQKPGQAPRGLIGGTNKRAPWTPARFSGSLLGGKAALTLSGAQPEDEAEYYCALWYSNLWVFGGGTKLTVLEPKSSDKTHTCPPCPAPEAAGGPSVFLFPPKPKDTLYITREPEVTCVVVDVSHEDPEVKFNWYVDGVEVHNAKTKPREEQYNSTYRVVSVLTVLHQDWLNGKEYKCKVSNKALPASIEKTISKAKGQPREPQVYTLPPSREEMTKNQVSLWCLVKGFYPSDIAVEWESNGQPENNYKTTPPVLDSDGSFFLYSKLTVDKSRWQQGNVFSCSVMHEALHNHYTQKSLSLSPGK

SEQ ID NO: 818 - protein, 486 aa, synthetic construct
  REGION 1..486: note = Description of Artificial Sequence: Synthetic polypeptide
EVQLVESGGGLVQPGGSLRLSCAASGFTFNTYAMNWVRQAPGKGLEWVGRIRSKYNNYATYYAASVKGRFTISRDDSKNSLYLQMNSLKTEDTAMYYCVRHGNFGHSYVSWFAYWGQGTLVTVSSGGGGSGGGGSGGGGSGGGGSQAVVTQEPSLTVSPGGTVTLTCGSSTGAVTTGHYANWVQQKPGQAPRGLIGGTNKRAPWTPARFSGSLLGGKAALTLSGAQPEDEAEYYCALWYSNLWVFGGGTKLTVLEPKSSDKTHTCPPCPAPEAAGGPSVFLFPPKPKDTLMISRTPEVTCVVVDVSHEDPEVKFNWYVDGVEVHNAKTKPREEQYNSTYRVVSVLTVLHQDWLNGKEYKCKVSNKALPASIEKTISKAKGQPREPQVYTLPPSREEMTKNQVSLWCLVKGFYPSDIAVEWESNGQPENNYKTTPPVLDSDGSFFLYSKLTVDKSRWQQGNVFSCSVMHEALHNHYTQKSLSLSPGK

SEQ ID NO: 819 - protein, 486 aa, synthetic construct
  REGION 1..486: note = Description of Artificial Sequence: Synthetic polypeptide
EVQLVESGGGLVQPGGSLRLSCAASGFTFSTYAMNWVRQAPGKGLEWVGRIRSKYNNYATYYAASVKGRFTISRDDSKNTLYLQMNSLRTEDTAVYYCVRHGNFGHSYVSWFAYWGQGTLVTVSSGGGGSGGGGSGGGGSGGGGSQAVVTQEPSLTVSPGGTVTLTCGSSTGAVTTGHYANWVQQKPGQAPRGLIGGTNKRAPGVPARFSGSLLGGKAALTISGAQPEDEAEYYCALWYSNRWVFGGGTKLTVLEPKSSDKTHTCPPCPAPEAAGGPSVFLFPPKPKDTLMISRTPEVTCVVVDVSHEDPEVKFNWYVDGVEVHNAKTKPREEQYNSTYRVVSVLTVLHQDWLNGKEYKCKVSNKALPASIEKTISKAKGQPREPQVYTLPPSREEMTKNQVSLSCAVKGFYPSDIAVEWESNGQPENNYKTTPPVLDSDGSFFLVSKLTVDKSRWQQGNVFSCSVMHEALHNRYTQKSLSLSPGK

SEQ ID NO: 820 - protein, 486 aa, synthetic construct
  REGION 1..486: note = Description of Artificial Sequence: Synthetic polypeptide
EVQLVESGGGLVQPGGSLRLSCAASGFTFSTYAMNWVRQAPGKGLEWVGRIRSKYNNYATYYAASVKGRFTISRDDSKNSLYLQMNSLRTEDTAVYYCVRHGNFGHSYVSWFAVWGQGTLVTVSSGGGGSGGGGSGGGGSGGGGSQAVVTQEPSLTVSPGGTVTLTCGSSTGAVTTSNYANWVQQKPGQAPRGLIGGTSNRAPWTPARFSGSLLGGKAALTLSGAQPEDEAEYYCALWYSNLWVFGGGTKLTVLEPKSSDKTHTCPPCPAPEAAGGPSVFLFPPKPKDTLMISRTPEVTCVVVDVSHEDPEVKFNWYVDGVEVHNAKTKPREEQYNSTYRVVSVLTVLHQDWLNGKEYKCKVSNKALPASIEKTISKAKGQPREPQVYTLPPSREEMTKNQVSLSCAVKGFYPSDIAVEWESNGQPENNYKTTPPVLDSDGSFFLVSKLTVDKSRWQQGNVFSCSVMHEALHNRYTQKSLSLSPGK

SEQ ID NO: 821 - protein, 486 aa, synthetic construct; identical to SEQ ID NO: 777
  REGION 1..486: note = Description of Artificial Sequence: Synthetic polypeptide

SEQ ID NO: 822 - protein, 462 aa, synthetic construct
  REGION 1..462: note = Description of Artificial Sequence: Synthetic polypeptide
QMQLQESGPGLVKPSETLSLTCSVSGASISDSYWSWIRRSPGKGLEWIGYVHKSGDTNYNPSLKSRVHLSLDTSKNQVSLSLTGVTAADSGKYYCARTLHGRRIYGIVAFNEWFTYFYMDVWGTGTQVTVSSASTKGPSVFPLAPSSKSTSGGTAALGCLVKDYFPEPVTVSWNSGALTSGVHTFPAVLQSSGLYSLSSVVTVPSSSLGTQTYICNVNHKPSNTKVDKKVEPKSCDKTHTCPPCPAPEAAGGPSVFLFPPKPKDTLYITREPEVTCVVVDVSHEDPEVKFNWYVDGVEVHNAKTKPREEQYNSTYRVVSVLTVLHQDWLNGKEYKCKVSNKALPASIEKTISKAKGQPREPQVYTLPPSREEMTKNQVSLSCAVKGFYPSDIAVEWESNGQPENNYKTTPPVLDSDGSFFLVSKLTVDKSRWQQGNVFSCSVMHEALHNHYTQKSLSLSPGK

SEQ ID NO: 823 - protein, 211 aa, synthetic construct
  REGION 1..211: note = Description of Artificial Sequence: Synthetic polypeptide
SDISVAPGETARISCGEKSLGSRAVQWYQHRAGQAPSLIIYNNQDRPSGIPERFSGSPDFRPGTTATLTITSVEAGDEADYYCHIWDSRVPTKWVFGGGTTLTVLGQPKAAPSVTLFPPSSEELQANKATLVCLISDFYPGAVTVAWKADSSPVKAGVETTTPSKQSNNKYAASSYLSLTPEQWKSHRSYSCQVTHEGSTVEKTVAPTECS

SEQ ID NO: 824 - protein, 486 aa, synthetic construct; identical to SEQ ID NO: 777
  REGION 1..486: note = Description of Artificial Sequence: Synthetic polypeptide

SEQ ID NO: 825 - protein, 462 aa, synthetic construct
  REGION 1..462: note = Description of Artificial Sequence: Synthetic polypeptide
QMQLQESGPGLVKPSETLSLTCSVSGASISDSYWSWIRRSPGKGLEWIGYVHKSGDTNYNPSLKSRVHLSLDTSKNQVSLSLTGVTAADSGKYYCARTLHGRRIYGIVAFNEWFTYFYMDVWGTGTQVTVSSASTKGPSVFPLAPSSKSTSGGTAALGCLVKDYFPEPVTVSWNSGALTSGVHTFPAVLQSSGLYSLSSVVTVPSSSLGTQTYICNVNHKPSNTKVDKKVEPKSCDKTHTCPPCPAPEAAGGPSVFLFPPKPKDTLMISRTPEVTCVVVDVSHEDPEVKFNWYVDGVEVHNAKTKPREEQYNSTYRVVSVLTVLHQDWLNGKEYKCKVSNKALPASIEKTISKAKGQPREPQVYTLPPSREEMTKNQVSLSCAVKGFYPSDIAVEWESNGQPENNYKTTPPVLDSDGSFFLVSKLTVDKSRWQQGNVFSCSVMHEALHNRYTQKSLSLSPGK

SEQ ID NO: 826 - protein, 486 aa, synthetic construct; identical to SEQ ID NO: 779
  REGION 1..486: note = Description of Artificial Sequence: Synthetic polypeptide

SEQ ID NO: 827 - protein, 462 aa, synthetic construct
  REGION 1..462: note = Description of Artificial Sequence: Synthetic polypeptide
QMQLQESGPGLVKPSETLSLTCSVSGASISDSYWSWIRRSPGKGLEWIGYVHKSGDTNYNPSLKSRVHLSLDTSKNQVSLSLTGVTAADSGKYYCARTLHGRRIYGIVAFNEWFTYFYMDVWGTGTQVTVSSASTKGPSVFPLAPSSKSTSGGTAALGCLVKDYFPEPVTVSWNSGALTSGVHTFPAVLQSSGLYSLSSVVTVPSSSLGTQTYICNVNHKPSNTKVDKKVEPKSCDKTHTCPPCPAPEAAGGPSVFLFPPKPKDTLMISRTPEVTCVVVDVSHEDPEVKFNWYVDGVEVHNAKTKPREEQYNSTYRVVSVLTVLHQDWLNGKEYKCKVSNKALPASIEKTISKAKGQPREPQVYTLPPSREEMTKNQVSLSCAVKGFYPSDIAVEWESNGQPENNYKTTPPVLDSDGSFFLVSKLTVDKSRWQQGNVFSCSVMHEALHNHYTQKSLSLSPGK

SEQ ID NO: 828 - protein, 486 aa, synthetic construct
  REGION 1..486: note = Description of Artificial Sequence: Synthetic polypeptide
EVQLVESGGGLVQPGGSLRLSCAASGFTFNTYAMNWVRQAPGKGLEWVGRIRSKYNNYATYYADSVKGRFTISRDDSKNSLYLQMNSLRTEDTAVYYCVRHGNFGHSYVSWFAYWGQGTLVTVSSGGGGSGGGGSGGGGSGGGGSQAVVTQEPSLTVSPGGTVTLTCGSSTGAVTTGHYANWVQQKPGQAPRGLIGGTSNRAPGVPARFSGSLLGGKAALTISGAQPEDEAEYYCALWYSNRWVFGGGTKLTVLEPKSSDKTHTCPPCPAPEAAGGPSVFLFPPKPKDTLMISRTPEVTCVVVDVSHEDPEVKFNWYVDGVEVHNAKTKPREEQYNSTYRVVSVLTVLHQDWLNGKEYKCKVSNKALPASIEKTISKAKGQPREPQVYTLPPSREEMTKNQVSLSCAVKGFYPSDIAVEWESNGQPENNYKTTPPVLDSDGSFFLVSKLTVDKSRWQQGNVFSCSVMHEALHNRYTQKSLSLSPGK

SEQ ID NO: 829 - protein, 462 aa, synthetic construct
  REGION 1..462: note = Description of Artificial Sequence: Synthetic polypeptide
QMQLQESGPGLVKPSETLSLTCSVSGASISDSYWSWIRRSPGKGLEWIGYVHKSGDTNYNPSLKSRVHLSLDTSKNQVSLSLTGVTAADSGKYYCARTLHGRRIYGIVAFNEWFTYFYMDVWGTGTQVTVSSASTKGPSVFPLAPSSKSTSGGTAALGCLVKDYFPEPVTVSWNSGALTSGVHTFPAVLQSSGLYSLSSVVTVPSSSLGTQTYICNVNHKPSNTKVDKKVEPKSCDKTHTCPPCPAPEAAGGPSVFLFPPKPKDTLMISRTPEVTCVVVDVSHEDPEVKFNWYVDGVEVHNAKTKPREEQYNSTYRVVSVLTVLHQDWLNGKEYKCKVSNKALPASIEKTISKAKGQPREPQVYTLPPSREEMTKNQVSLWCLVKGFYPSDIAVEWESNGQPENNYKTTPPVLDSDGSFFLYSKLTVDKSRWQQGNVFSCSVMHEALHNHYTQKSLSLSPGK

SEQ ID NO: 830 - protein, 486 aa, synthetic construct; identical to SEQ ID NO: 806
  REGION 1..486: note = Description of Artificial Sequence: Synthetic polypeptide

SEQ ID NO: 831 - protein, 486 aa, synthetic construct; identical to SEQ ID NO: 807
  REGION 1..486: note = Description of Artificial Sequence: Synthetic polypeptide

SEQ ID NO: 832 - protein, 486 aa, synthetic construct; identical to SEQ ID NO: 808
  REGION 1..486: note = Description of Artificial Sequence: Synthetic polypeptide

SEQ ID NO: 833 - protein, 462 aa, synthetic construct
  REGION 1..462: note = Description of Artificial Sequence: Synthetic polypeptide
QMQLQESGPGLVKPSETLSLTCSVSGASISDSYWSWIRRSPGKGLEWIGYVHKSGDTNYNPSLKSRVHLSLDTSKNQVSLSLTGVTAADSGKYYCARTLHGRRIYGIVAFNEWFTYFYMDVWGTGTQVTVSSASTKGPSVFPLAPSSKSTSGGTAALGCLVKDYFPEPVTVSWNSGALTSGVHTFPAVLQSSGLYSLSSVVTVPSSSLGTQTYICNVNHKPSNTKVDKKVEPKSCDKTHTCPPCPAPEAAGGPSVFLFPPKPKDTLYITREPEVTCVVVDVSHEDPEVKFNWYVDGVEVHNAKTKPREEQYNSTYRVVSVLTVLHQDWLNGKEYKCKVSNKALPASIEKTISKAKGQPREPQVYTLPPSREEMTKNQVSLWCLVKGFYPSDIAVEWESNGQPENNYKTTPPVLDSDGSFFLYSKLTVDKSRWQQGNVFSCSVMHEALHNHYTQKSLSLSPGK

SEQ ID NO: 834 - protein, 486 aa, synthetic construct; identical to SEQ ID NO: 813
  REGION 1..486: note = Description of Artificial Sequence: Synthetic polypeptide

SEQ ID NO: 835 - protein, 486 aa, synthetic construct
  REGION 1..486: note = Description of Artificial Sequence: Synthetic polypeptide
EVQLVESGGGLVQPGGSLRLSCAASGFTFNTYAMNWVRQAPGKGLEWVGRIRSKYNNYATYYAASVKGRFTISRDDSKNSLYLQMNSLKTEDTAMYYCVRHGNFGNSYVSWFAYWGQGTLVTVSSGGGGSGGGGSGGGGSGGGGSQAVVTQEPSLTVSPGGTVTLTCGSSTGAVTTGHYANWVQQKPGQAPRGLIGGTNKRAPWTPARFSGSLLGGKAALTLSGAQPEDEAEYYCALWYSNLWVFGGGTKLTVLEPKSSDKTHTCPPCPAPEAAGGPSVFLFPPKPKDTLMISRTPEVTCVVVDVSHEDPEVKFNWYVDGVEVHNAKTKPREEQYNSTYRVVSVLTVLHQDWLNGKEYKCKVSNKALPASIEKTISKAKGQPREPQVYTLPPSREEMTKNQVSLSCAVKGFYPSDIAVEWESNGQPENNYKTTPPVLDSDGSFFLVSKLTVDKSRWQQGNVFSCSVMHEALHNRFTQKSLSLSPGK

SEQ ID NO: 836 - protein, 486 aa, synthetic construct; identical to SEQ ID NO: 773
  REGION 1..486: note = Description of Artificial Sequence: Synthetic polypeptide

SEQ ID NO: 837 - protein, 486 aa, synthetic construct; identical to SEQ ID NO: 773
  REGION 1..486: note = Description of Artificial Sequence: Synthetic polypeptide

SEQ ID NO: 838 - protein, 462 aa, synthetic construct
  REGION 1..462: note = Description of Artificial Sequence: Synthetic polypeptide
QMQLQESGPGLVKPSETLSLTCSVSGASISDSYWSWIRRSPGKGLEWIGYVHKSGDTNYNPSLKSRVHLSLDTSKNQVSLSLTGVTAADSGKYYCARTLHGRRIYGIVAFNEWFTYFYMDVWGTGTQVTVSSASTKGPSVFPLAPSSKSTSGGTAALGCLVKDYFPEPVTVSWNSGALTSGVHTFPAVLQSSGLYSLSSVVTVPSSSLGTQTYICNVNHKPSNTKVDKKVEPKSCDKTHTCPPCPAPEAAGGPSVFLFPPKPKDTLMISRTPEVTCVVVDVSHEDPEVKFNWYVDGVEVHNAKTKPREEQYNSTYRVVSVLTVLHQDWLNGKEYKCKVSNKALPASIEKTISKAKGQPREPQVYTLPPSREEMTKNQVSLWCLVKGFYPSDIAVEWESNGQPENNYKTTPPVLDSDGSFFLYSKLTVDKSRWQQGNVFSCSVLHEALHSHYTQKSLSLSPGK

SEQ ID NO: 839 - protein, 486 aa, synthetic construct
  REGION 1..486: note = Description of Artificial Sequence: Synthetic polypeptide
EVQLVESGGGLVQPGGSLRLSCAASGFTFNTYAMNWVRQAPGKGLEWVGRIRSKYNNYATYYAASVKGRFTISRDDSKNSLYLQMNSLKTEDTAMYYCVRHGNFGNSYVSWFAYWGQGTLVTVSSGGGGSGGGGSGGGGSGGGGSQAVVTQEPSLTVSPGGTVTLTCGSSTGAVTTGHYANWVQQKPGQAPRGLIGGTNKRAPWTPARFSGSLLGGKAALTLSGAQPEDEAEYYCALWYSNLWVFGGGTKLTVLEPKSSDKTHTCPPCPAPELLGGPSVFLFPPKPKDTLMISRTPEVTCVVVDVSHEDPEVKFNWYVDGVEVHNAKTKPREEQYNSTYRVVSVLTVLHQDWLNGKEYKCKVSNKALPAPIEKTISKAKGQPREPQVYTLPPSREEMTKNQVSLSCAVKGFYPSDIAVEWESNGQPENNYKTTPPVLDSDGSFFLVSKLTVDKSRWQQGNVFSCSVMHEALHNRYTQKSLSLSPGK

SEQ ID NO: 840 - protein, 462 aa, synthetic construct
  REGION 1..462: note = Description of Artificial Sequence: Synthetic polypeptide
QMQLQESGPGLVKPSETLSLTCSVSGASISDSYWSWIRRSPGKGLEWIGYVHKSGDTNYNPSLKSRVHLSLDTSKNQVSLSLTGVTAADSGKYYCARTLHGRRIYGIVAFNEWFTYFYMDVWGTGTQVTVSSASTKGPSVFPLAPSSKSTSGGTAALGCLVKDYFPEPVTVSWNSGALTSGVHTFPAVLQSSGLYSLSSVVTVPSSSLGTQTYICNVNHKPSNTKVDKKVEPKSCDKTHTCPPCPAPELLGGPSVFLFPPKPKDTLMISRTPEVTCVVVDVSHEDPEVKFNWYVDGVEVHNAKTKPREEQYNSTYRVVSVLTVLHQDWLNGKEYKCKVSNKALPAPIEKTISKAKGQPREPQVYTLPPSREEMTKNQVSLWCLVKGFYPSDIAVEWESNGQPENNYKTTPPVLDSDGSFFLYSKLTVDKSRWQQGNVFSCSVMHEALHNHYTQKSLSLSPGK

SEQ ID NO: 841 - protein, 486 aa, synthetic construct
  REGION 1..486: note = Description of Artificial Sequence: Synthetic polypeptide
EVQLVESGGGLVQPGGSLRLSCAASGFTFNTYAMNWVRQAPGKGLEWVGRIRSKYNNYATYYADSVKGRFTISRDDSKNSLYLQMNSLRTEDTAVYYCVRHGNFGHSYVSWFAYWGQGTLVTVSSGGGGSGGGGSGGGGSGGGGSQAVVTQEPSLTVSPGGTVTLTCGSSTGAVTTGHYANWVQQKPGQAPRGLIGGTNKRAPGVPARFSGSLLGGKAALTISGAQPEDEAEYYCALWYSNRWVFGGGTKLTVLEPKSSDKTHTCPPCPAPEAAGGPSVFLFPPKPKDTLMISRTPEVTCVVVDVSHEDPEVKFNWYVDGVEVHNAKTKPREEQYNSTYRVVSVLTVLHQDWLNGKEYKCKVSNKALPASIEKTISKAKGQPREPQVYTLPPSREEMTKNQVSLSCAVKGFYPSDIAVEWESNGQPENNYKTTPPVLDSDGSFFLVSKLTVDKSRWQQGNVFSCSVMHEALHNRYTQKSLSLSPGK

SEQ ID NO: 842 - protein, 486 aa, synthetic construct
  REGION 1..486: note = Description of Artificial Sequence: Synthetic polypeptide
EVQLVESGGGLVQPGGSLRLSCAASGFTFNTYAMNWVRQAPGKGLEWVGRIRSKYNNYATYYAASVKGRFTISRDDSKNSLYLQMNSLKTEDTAMYYCVRHGNFGHSYVSWFAYWGQGTLVTVSSGGGGSGGGGSGGGGSGGGGSQAVVTQEPSLTVSPGGTVTLTCGSSTGAVTTGHYANWVQQKPGQAPRGLIGGTNKRAPWTPARFSGSLLGGKAALTLSGAQPEDEAEYYCALWYSNLWVFGGGTKLTVLEPKSSDKTHTCPPCPAPEAAGGPSVFLFPPKPKDTLMISRTPEVTCVVVDVSHEDPEVKFNWYVDGVEVHNAKTKPREEQYNSTYRVVSVLTVLHQDWLNGKEYKCKVSNKALPASIEKTISKAKGQPREPQVYTLPPSREEMTKNQVSLSCAVKGFYPSDIAVEWESNGQPENNYKTTPPVLDSDGSFFLVSKLTVDKSRWQQGNVFSCSVMHEALHNRYTQKSLSLSPGK

SEQ ID NO: 843 - protein, 486 aa, synthetic construct
  REGION 1..486: note = Description of Artificial Sequence: Synthetic polypeptide
EVQLVESGGGLVQPGGSLRLSCAASGFTFNTYAMNWVRQAPGKGLEWVGRIRSKYNNYATYYADSVKGRFTISRDDSKNSLYLQMNSLRTEDTAVYYCVRHGNFGHSYVSWFAYWGQGTLVTVSSGGGGSGGGGSGGGGSGGGGSQAVVTQEPSLTVSPGGTVTLTCGSSTGAVTTSHYANWVQQKPGQAPRGLIGGTSKRAPWTPARFSGSLLGGKAALTLSGAQPEDEAEYYCALWYSALWVFGGGTKLTVLEPKSSDKTHTCPPCPAPEAAGGPSVFLFPPKPKDTLMISRTPEVTCVVVDVSHEDPEVKFNWYVDGVEVHNAKTKPREEQYNSTYRVVSVLTVLHQDWLNGKEYKCKVSNKALPASIEKTISKAKGQPREPQVYTLPPSREEMTKNQVSLSCAVKGFYPSDIAVEWESNGQPENNYKTTPPVLDSDGSFFLVSKLTVDKSRWQQGNVFSCSVMHEALHNRFTQKSLSLSPGK

SEQ ID NO: 844 - protein, 486 aa, synthetic construct
  REGION 1..486: note = Description of Artificial Sequence: Synthetic polypeptide
EVQLVESGGGLVQPGGSLRLSCAASGFTFNTYAMNWVRQAPGKGLEWVGRIRSKYNNYATYYADSVKGRFTISRDDSKNSLYLQMNSLRTEDTAVYYCVRHGNFGHSYVSWFAYWGQGTLVTVSSGGGGSGGGGSGGGGSGGGGSQAVVTQPPSLTVSPGGTVTLTCGSSTGAVTTGHYANWVQQKPGQAPRGLIGGTSNRAPGVPARFSGSLSGGKAALTISGAQPEDEAEYYCALWYSARWVFGGGTKLTVLEPKSSDKTHTCPPCPAPEAAGGPSVFLFPPKPKDTLMISRTPEVTCVVVDVSHEDPEVKFNWYVDGVEVHNAKTKPREEQYNSTYRVVSVLTVLHQDWLNGKEYKCKVSNKALPASIEKTISKAKGQPREPQVYTLPPSREEMTKNQVSLSCAVKGFYPSDIAVEWESNGQPENNYKTTPPVLDSDGSFFLVSKLTVDKSRWQQGNVFSCSVMHEALHNRFTQKSLSLSPGK

SEQ ID NO: 845 - protein, 486 aa, synthetic construct
  REGION 1..486: note = Description of Artificial Sequence: Synthetic polypeptide
EVQLVESGGGLVQPGGSLRLSCAASGFTFSDYAMNWVRQAPGKGLEWVGRTRSKYNNYATYYAASVKGRFTISRDDSKNSLYLQMNSLKTEDTAVYYCVRHGNFGHSYVSWFAVWGQGTLVTVSSGGGGSGGGGSGGGGSGGGGSQAVVTQEPSLTVSPGGTVTLTCGSSTGAVTTGHYANWVQQKPGQAPRGLIGGTNKRAPWTPARFSGSLLGGKAALTLSGAQPEDEAEYYCALWYSNLWVFGGGTKLTVLEPKSSDKTHTCPPCPAPEAAGGPSVFLFPPKPKDTLMISRTPEVTCVVVDVSHEDPEVKFNWYVDGVEVHNAKTKPREEQYNSTYRVVSVLTVLHQDWLNGKEYKCKVSNKALPASIEKTISKAKGQPREPQVYTLPPSREEMTKNQVSLSCAVKGFYPSDIAVEWESNGQPENNYKTTPPVLDSDGSFFLVSKLTVDKSRWQQGNVFSCSVMHEALHNRFTQKSLSLSPGK

SEQ ID NO: 846 - protein, 486 aa, synthetic construct; identical to SEQ ID NO: 819
  REGION 1..486: note = Description of Artificial Sequence: Synthetic polypeptide

SEQ ID NO: 847 - protein, 486 aa, synthetic construct
  REGION 1..486: note = Description of Artificial Sequence: Synthetic polypeptide
EVQLVESGGGLVQPGGSLRLSCAASGFTFSTYAMNWVRQAPGKGLEWVGRIRSKYNNYATYYAASVKGRFTISRDDSKNTLYLQMNSLRTEDTAVYYCVRHGNFGHSYVSWFAYWGQGTLVTVSSGGGGSGGGGSGGGGSGGGGSQAVVTQPPSLTVSPGGTVTLTCGSSTGAVTTGHYANWVQQKPGQAPRGLIGGTNKRAPGVPARFSGSLSGGKAALTISGAQPEDEAEYYCALWYSNRWVFGGGTKLTVLEPKSSDKTHTCPPCPAPEAAGGPSVFLFPPKPKDTLMISRTPEVTCVVVDVSHEDPEVKFNWYVDGVEVHNAKTKPREEQYNSTYRVVSVLTVLHQDWLNGKEYKCKVSNKALPASIEKTISKAKGQPREPQVYTLPPSREEMTKNQVSLWCLVKGFYPSDIAVEWESNGQPENNYKTTPPVLDSDGSFFLYSKLTVDKSRWQQGNVFSCSVMHEALHNHYTQKSLSLSPGK

SEQ ID NO: 848 - protein, 486 aa, synthetic construct
  REGION 1..486: note = Description of Artificial Sequence: Synthetic polypeptide
EVQLVESGGGLVQPGGSLRLSCAASGFTFSTYAMNWVRQAPGKGLEWVGRIRSKYNNYATYYAASVKGRFTISRDDSKNTLYLQMNSLRTEDTAVYYCVRHGNFGHSYVSWFAYWGQGTLVTVSSGGGGSGGGGSGGGGSGGGGSQAVVTQPPSLTVSPGGTVTLTCGSSTGAVTTGHYANWVQQKPGQAPRGLIGGTNKRAPGVPARFSGSLSGGKAALTISGAQPEDEAEYYCALWYSNRWVFGGGTKLTVLEPKSSDKTHTCPPCPAPEAAGGPSVFLFPPKPKDTLMISRTPEVTCVVVDVSHEDPEVKFNWYVDGVEVHNAKTKPREEQYNSTYRVVSVLTVLHQDWLNGKEYKCKVSNKALPASIEKTISKAKGQPREPQVYTLPPSREEMTKNQVSLSCAVKGFYPSDIAVEWESNGQPENNYKTTPPVLDSDGSFFLVSKLTVDKSRWQQGNVFSCSVMHEALHNRFTQKSLSLSPGK

SEQ ID NO: 849 - protein, 486 aa, synthetic construct
  REGION 1..486: note = Description of Artificial Sequence: Synthetic polypeptide
EVQLVESGGGLVQPGGSLSLSCAASGFTFSTYAMNWVRQAPGKGLEWVGRIRSKYNNYATYYAASVKGRFTISRDDSKNTLYLQMNSLRTEDTAVYYCVRHGNFGHSYVSWFAYWGQGTLVTVSSGGGGSGGGGSGGGGSGGGGSQAVVTQEPSLTVSPGGTVTLTCGSSTGAVTTGHYANWVQQKPGQAPRGLIGGTNKRAPGVPARFSGSLLGGKAALTISGAQPEDEAEYYCALWYSNRWVFGGGTKLTVLEPKSSDKTHTCPPCPAPEAAGGPSVFLFPPKPKDTLMISRTPEVTCVVVDVSHEDPEVKFNWYVDGVEVHNAKTKPREEQYNSTYRVVSVLTVLHQDWLNGKEYKCKVSNKALPASIEKTISKAKGQPREPQVYTLPPSREEMTKNQVSLSCAVKGFYPSDIAVEWESNGQPENNYKTTPPVLDSDGSFFLVSKLTVDKSRWQQGNVFSCSVMHEALHNRYTQKSLSLSPGK

SEQ ID NO: 850 - protein, 486 aa, synthetic construct
  REGION 1..486: note = Description of Artificial Sequence: Synthetic polypeptide
EVQLVESGGGLVQPGGSLRLSCAASGFTFSTYAMNWVRQAPGKGLEWVGRIRSKYNNYATYYAASVKGRFTISRDDSKNTLYLEMNSLRTEDTAVYYCVRHGNFGHSYVSWFAYWGQGTLVTVSSGGGGSGGGGSGGGGSGGGGSQAVVTQEPSLTVSPGGTVTLTCGSSTGAVTTGHYANWVQQKPGQAPRGLIGGTNKRAPGVPARFSGSLLGGKAALTISGAQPEDEAEYYCALWYSNRWVFGGGTKLTVLEPKSSDKTHTCPPCPAPEAAGGPSVFLFPPKPKDTLMISRTPEVTCVVVDVSHEDPEVKFNWYVDGVEVHNAKTKPREEQYNSTYRVVSVLTVLHQDWLNGKEYKCKVSNKALPASIEKTISKAKGQPREPQVYTLPPSREEMTKNQVSLSCAVKGFYPSDIAVEWESNGQPENNYKTTPPVLDSDGSFFLVSKLTVDKSRWQQGNVFSCSVMHEALHNRYTQKSLSLSPGK

SEQ ID NO: 851 - protein, 486 aa, synthetic construct
  REGION 1..486: note = Description of Artificial Sequence: Synthetic polypeptide
EVQLVESGGGLVQPGGSLRLSCAASGFTFSTYAMNWVRQAPGKGLEWVGRIRSKYNNYAAYYAASVKSRFTISRDDSKNTLYLQMNSLRTEDTAVYYCVRHGNFGHSYVSWFAYWGQGTLVTVSSGGGGSGGGGSGGGGSGGGGSQAVVTQEPSLTVSPGGTVTLTCGSSTGAVTTGHYANWVQQKPGQAPRGLIGGTNKRAPGVPARFSGSLLGGKAALTISGAQPEDEAEYYCALWYSNRWVFGGGTKLTVLEPKSSDKTHTCPPCPAPEAAGGPSVFLFPPKPKDTLMISRTPEVTCVVVDVSHEDPEVKFNWYVDGVEVHNAKTKPREEQYNSTYRVVSVLTVLHQDWLNGKEYKCKVSNKALPASIEKTISKAKGQPREPQVYTLPPSREEMTKNQVSLSCAVKGFYPSDIAVEWESNGQPENNYKTTPPVLDSDGSFFLVSKLTVDKSRWQQGNVFSCSVMHEALHNRYTQKSLSLSPGK

SEQ ID NO: 852 - protein, 486 aa, synthetic construct
  REGION 1..486: note = Description of Artificial Sequence: Synthetic polypeptide
EVQLVESGGGLVQPGGSLSLSCAASGFTFSTYAMNWVRQAPGKGLEWVGRIRSKYNNYAAYYAASVKGRFTISRDDSKNTLYLQMNSLRTEDTAVYYCVRHGNFGHSYVSWFAYWGQGTLVTVSSGGGGSGGGGSGGGGSGGGGSQAVVTQEPSLTVSPGGTVTLTCGSSTGAVTTGHYANWVQQKPGQAPRGLIGGTNKRAPGVPARFSGSLLGGKAALTISGAQPEDEAEYYCALWYSNRWVFGGGTKLTVLEPKSSDKTHTCPPCPAPEAAGGPSVFLFPPKPKDTLMISRTPEVTCVVVDVSHEDPEVKFNWYVDGVEVHNAKTKPREEQYNSTYRVVSVLTVLHQDWLNGKEYKCKVSNKALPASIEKTISKAKGQPREPQVYTLPPSREEMTKNQVSLSCAVKGFYPSDIAVEWESNGQPENNYKTTPPVLDSDGSFFLVSKLTVDKSRWQQGNVFSCSVMHEALHNRYTQKSLSLSPGK

SEQ ID NO: 853 - protein, 486 aa, synthetic construct
  REGION 1..486: note = Description of Artificial Sequence: Synthetic polypeptide
EVQLVESGGGLVQPGGSLSLSCAASGFTFSTYAMNWVRQAPGKGLEWVGRIRSKYNNYAEYYAASVKGRFTISRDDSKNTLYLQMNSLRTEDTAVYYCVRHGNFGHSYVSWFAYWGQGTLVTVSSGGGGSGGGGSGGGGSGGGGSQAVVTQEPSLTVSPGGTVTLTCGSSTGAVTTGHYANWVQQKPGQAPRGLIGGTNKRAPGVPARFSGSLLGGKAALTISGAQPEDEAEYYCALWYSNRWVFGGGTKLTVLEPKSSDKTHTCPPCPAPEAAGGPSVFLFPPKPKDTLMISRTPEVTCVVVDVSHEDPEVKFNWYVDGVEVHNAKTKPREEQYNSTYRVVSVLTVLHQDWLNGKEYKCKVSNKALPASIEKTISKAKGQPREPQVYTLPPSREEMTKNQVSLSCAVKGFYPSDIAVEWESNGQPENNYKTTPPVLDSDGSFFLVSKLTVDKSRWQQGNVFSCSVMHEALHNRYTQKSLSLSPGK

SEQ ID NO: 854 - protein, 486 aa, synthetic construct
  REGION 1..486: note = Description of Artificial Sequence: Synthetic polypeptide
EVQLVESGGGLVQPGGSLSLSCAASGFTFSTYAMNWVRQAPGKGLEWVGRIRSKYNNYATYYAASVKSRFTISRDDSKNTLYLQMNSLRTEDTAVYYCVRHGNFGHSYVSWFAYWGQGTLVTVSSGGGGSGGGGSGGGGSGGGGSQAVVTQEPSLTVSPGGTVTLTCGSSTGAVTTGHYANWVQQKPGQAPRGLIGGTNKRAPGVPARFSGSLLGGKAALTISGAQPEDEAEYYCALWYSNRWVFGGGTKLTVLEPKSSDKTHTCPPCPAPEAAGGPSVFLFPPKPKDTLMISRTPEVTCVVVDVSHEDPEVKFNWYVDGVEVHNAKTKPREEQYNSTYRVVSVLTVLHQDWLNGKEYKCKVSNKALPASIEKTISKAKGQPREPQVYTLPPSREEMTKNQVSLSCAVKGFYPSDIAVEWESNGQPENNYKTTPPVLDSDGSFFLVSKLTVDKSRWQQGNVFSCSVMHEALHNRYTQKSLSLSPGK

SEQ ID NO: 855 - protein, 486 aa, synthetic construct
  REGION 1..486: note = Description of Artificial Sequence: Synthetic polypeptide
EVQLVESGGGLVQPGGSLRLSCAASGFTFSTYAMNWVRQAPGKGLEWVGRIRSKYNNYATYYAASVKSRFTISRDDSKNTLYLEMNSLRTEDTAVYYCVRHGNFGHSYVSWFAYWGQGTLVTVSSGGGGSGGGGSGGGGSGGGGSQAVVTQEPSLTVSPGGTVTLTCGSSTGAVTTGHYANWVQQKPGQAPRGLIGGTNKRAPGVPARFSGSLLGGKAALTISGAQPEDEAEYYCALWYSNRWVFGGGTKLTVLEPKSSDKTHTCPPCPAPEAAGGPSVFLFPPKPKDTLMISRTPEVTCVVVDVSHEDPEVKFNWYVDGVEVHNAKTKPREEQYNSTYRVVSVLTVLHQDWLNGKEYKCKVSNKALPASIEKTISKAKGQPREPQVYTLPPSREEMTKNQVSLSCAVKGFYPSDIAVEWESNGQPENNYKTTPPVLDSDGSFFLVSKLTVDKSRWQQGNVFSCSVMHEALHNRYTQKSLSLSPGK

SEQ ID NO: 856 - protein, 486 aa, synthetic construct
  REGION 1..486: note = Description of Artificial Sequence: Synthetic polypeptide
EVQLVESGGGLVQPGGSLRLSCAASGFTFNTYAMNWVRQAPGKGLEWVGRIRSKYNNYATYYAASVKGRFTISRDDSKNSLYLQMNSLKTEDTAMYYCVRHGNFGHSYVSWFAYWGQGTLVTVSSGGGGSGGGGSGGGGSGGGGSQAVVTQPPSLTVSPGGTVTLTCGSSTGAVTTGHYANWVQQKPGQAPRGLIGGTNKRAPGVPARFSGSLSGGKAALTISGAQPEDEAEYYCALWYSNRWVFGGGTKLTVLEPKSSDKTHTCPPCPAPEAAGGPSVFLFPPKPKDTLMISRTPEVTCVVVDVSHEDPEVKFNWYVDGVEVHNAKTKPREEQYNSTYRVVSVLTVLHQDWLNGKEYKCKVSNKALPASIEKTISKAKGQPREPQVYTLPPSREEMTKNQVSLSCAVKGFYPSDIAVEWESNGQPENNYKTTPPVLDSDGSFFLVSKLTVDKSRWQQGNVFSCSVMHEALHNRYTQKSLSLSPGK

SEQ ID NO: 857 - protein, 486 aa, synthetic construct
  REGION 1..486: note = Description of Artificial Sequence: Synthetic polypeptide
EVQLVESGGGLVQPGGSLRLSCAASGFTFNTYAMNWVRQAPGKGLEWVGRIRSKYNNYATYYAASVKGRFTISRDDSKNSLYLQMNSLKTEDTAMYYCVRHGNFGHSYVSWFAYWGQGTLVTVSSGGGGSGGGGSGGGGSGGGGSQAVVTQEPSLTVSPGGTVTLTCGSSTGAVTTGHYANWVQQKPGQAPRGLIGGTNKRAPGVPARFSGSLLGGKAALTLSGAQPEDEAEYYCALWYSNLWVFGGGTKLTVLEPKSSDKTHTCPPCPAPEAAGGPSVFLFPPKPKDTLMISRTPEVTCVVVDVSHEDPEVKFNWYVDGVEVHNAKTKPREEQYNSTYRVVSVLTVLHQDWLNGKEYKCKVSNKALPASIEKTISKAKGQPREPQVYTLPPSREEMTKNQVSLSCAVKGFYPSDIAVEWESNGQPENNYKTTPPVLDSDGSFFLVSKLTVDKSRWQQGNVFSCSVMHEALHNRYTQKSLSLSPGK

SEQ ID NO: 858 - protein, 486 aa, synthetic construct
  REGION 1..486: note = Description of Artificial Sequence: Synthetic polypeptide
EVQLVESGGGLVQPGGSLRLSCAASGFTFNTYAMNWVRQAPGKGLEWVGRIRSKYNNYATYYAASVKGRFTISRDDSKNSLYLQMNSLKTEDTAMYYCVRHGNFGHSYVSWFAYWGQGTLVTVSSGGGGSGGGGSGGGGSGGGGSQAVVTQPPSLTVSPGGTVTLTCGSSTGAVTTGHYANWVQQKPGQAPRGLIGGTNKRAPWTPARFSGSLSGGKAALTISGAQPEDEAEYYCALWYSNRWVFGGGTKLTVLEPKSSDKTHTCPPCPAPEAAGGPSVFLFPPKPKDTLMISRTPEVTCVVVDVSHEDPEVKFNWYVDGVEVHNAKTKPREEQYNSTYRVVSVLTVLHQDWLNGKEYKCKVSNKALPASIEKTISKAKGQPREPQVYTLPPSREEMTKNQVSLSCAVKGFYPSDIAVEWESNGQPENNYKTTPPVLDSDGSFFLVSKLTVDKSRWQQGNVFSCSVMHEALHNRYTQKSLSLSPGK

SEQ ID NO: 859 - protein, 486 aa, synthetic construct
  REGION 1..486: note = Description of Artificial Sequence: Synthetic polypeptide
EVQLVESGGGLVQPGGSLRLSCAASGFTFNTYAMNWVRQAPGKGLEWVGRIRSKYNNYAAYYADSVKSRFTISRDDSKNSLYLQMNSLRTEDTAVYYCVRHGNFGHSYVSWFAYWGQGTLVTVSSGGGGSGGGGSGGGGSGGGGSQAVVTQEPSLTVSPGGTVTLTCGSSTGAVTTGHYANWVQQKPGQAPRGLIGGTSNRAPGVPARFSGSLLGGKAALTISGAQPEDEAEYYCALWYSNRWVFGGGTKLTVLEPKSSDKTHTCPPCPAPEAAGGPSVFLFPPKPKDTLMISRTPEVTCVVVDVSHEDPEVKFNWYVDGVEVHNAKTKPREEQYNSTYRVVSVLTVLHQDWLNGKEYKCKVSNKALPASIEKTISKAKGQPREPQVYTLPPSREEMTKNQVSLSCAVKGFYPSDIAVEWESNGQPENNYKTTPPVLDSDGSFFLVSKLTVDKSRWQQGNVFSCSVMHEALHNRYTQKSLSLSPGK

SEQ ID NO: 860 - protein, 486 aa, synthetic construct
  REGION 1..486: note = Description of Artificial Sequence: Synthetic polypeptide
EVQLVESGGGLVQPGGSLSLSCAASGFTFNTYAMNWVRQAPGKGLEWVGRIRSKYNNYATYYADSVKSRFTISRDDSKNSLYLQMNSLRTEDTAVYYCVRHGNFGHSYVSWFAYWGQGTLVTVSSGGGGSGGGGSGGGGSGGGGSQAVVTQEPSLTVSPGGTVTLTCGSSTGAVTTGHYANWVQQKPGQAPRGLIGGTSNRAPGVPARFSGSLLGGKAALTISGAQPEDEAEYYCALWYSNRWVFGGGTKLTVLEPKSSDKTHTCPPCPAPEAAGGPSVFLFPPKPKDTLMISRTPEVTCVVVDVSHEDPEVKFNWYVDGVEVHNAKTKPREEQYNSTYRVVSVLTVLHQDWLNGKEYKCKVSNKALPASIEKTISKAKGQPREPQVYTLPPSREEMTKNQVSLSCAVKGFYPSDIAVEWESNGQPENNYKTTPPVLDSDGSFFLVSKLTVDKSRWQQGNVFSCSVMHEALHNRYTQKSLSLSPGK

SEQ ID NO: 861 - protein, 486 aa, synthetic construct; identical to SEQ ID NO: 777
  REGION 1..486: note = Description of Artificial Sequence: Synthetic polypeptide

SEQ ID NO: 862 - protein, 462 aa, synthetic construct
  REGION 1..462: note = Description of Artificial Sequence: Synthetic polypeptide
QVQLQESGPGLVKPSETLSVTCSVSGDSMNNYYWTWIRQSPGKGLEWIGYISDRESATYNPSLNSRVVISRDTSKNQLSLKLNSVTPADTAVYYCATARRGQRIYGVVSFGEFFYYYSMDVWGKGTTVTVSSASTKGPSVFPLAPSSKSTSGGTAALGCLVKDYFPEPVTVSWNSGALTSGVHTFPAVLQSSGLYSLSSVVTVPSSSLGTQTYICNVNHKPSNTKVDKKVEPKSCDKTHTCPPCPAPEAAGGPSVFLFPPKPKDTLYITREPEVTCVVVDVSHEDPEVKFNWYVDGVEVHNAKTKPREEQYNSTYRVVSVLTVLHQDWLNGKEYKCKVSNKALPASIEKTISKAKGQPREPQVYTLPPSREEMTKNQVSLSCAVKGFYPSDIAVEWESNGQPENNYKTTPPVLDSDGSFFLVSKLTVDKSRWQQGNVFSCSVMHEALHNHYTQKSLSLSPGK

SEQ ID NO: 863 - protein, 214 aa, synthetic construct
  REGION 1..214: note = Description of Artificial Sequence: Synthetic polypeptide
SYVRPLSVALGETARISCGRQALGSRAVQWYQHRPGQAPILLIYNNQDRPSGIPERFSGTPDINFGTRATLTISGVEAGDEADYYCHMWDSRSGFSWSFGGATRLTVLGQPKAAPSVTLFPPSSEELQANKATLVCLISDFYPGAVTVAWKADSSPVKAGVETTTPSKQSNNKYAASSYLSLTPEQWKSHRSYSCQVTHEGSTVEKTVAPTECS

SEQ ID NO: 864 - protein, 462 aa, synthetic construct
  REGION 1..462: note = Description of Artificial Sequence: Synthetic polypeptide
QVQLQESGPGLVKPSETLSVTCSVSGDSMNNYYWTWIRQSPGKGLEWIGYISDRESATYNPSLNSRVVISRDTSKNQLSLKLNSVTPADTAVYYCATARRGQRIYGVVSFGEFFYYYSMDVWGKGTTVTVSSASTKGPSVFPLAPSSKSTSGGTAALGCLVKDYFPEPVTVSWNSGALTSGVHTFPAVLQSSGLYSLSSVVTVPSSSLGTQTYICNVNHKPSNTKVDKKVEPKSCDKTHTCPPCPAPEAAGGPSVFLFPPKPKDTLMISRTPEVTCVVVDVSHEDPEVKFNWYVDGVEVHNAKTKPREEQYNSTYRVVSVLTVLHQDWLNGKEYKCKVSNKALPASIEKTISKAKGQPREPQVYTLPPSREEMTKNQVSLSCAVKGFYPSDIAVEWESNGQPENNYKTTPPVLDSDGSFFLVSKLTVDKSRWQQGNVFSCSVMHEALHNRYTQKSLSLSPGK

SEQ ID NO: 865 - protein, 486 aa, synthetic construct; identical to SEQ ID NO: 779
  REGION 1..486: note = Description of Artificial Sequence: Synthetic polypeptide

SEQ ID NO: 866 - protein, 462 aa, synthetic construct
  REGION 1..462: note = Description of Artificial Sequence: Synthetic polypeptide
QVQLQESGPGLVKPSETLSVTCSVSGDSMNNYYWTWIRQSPGKGLEWIGYISDRESATYNPSLNSRVVISRDTSKNQLSLKLNSVTPADTAVYYCATARRGQRIYGVVSFGEFFYYYSMDVWGKGTTVTVSSASTKGPSVFPLAPSSKSTSGGTAALGCLVKDYFPEPVTVSWNSGALTSGVHTFPAVLQSSGLYSLSSVVTVPSSSLGTQTYICNVNHKPSNTKVDKKVEPKSCDKTHTCPPCPAPEAAGGPSVFLFPPKPKDTLMISRTPEVTCVVVDVSHEDPEVKFNWYVDGVEVHNAKTKPREEQYNSTYRVVSVLTVLHQDWLNGKEYKCKVSNKALPASIEKTISKAKGQPREPQVYTLPPSREEMTKNQVSLSCAVKGFYPSDIAVEWESNGQPENNYKTTPPVLDSDGSFFLVSKLTVDKSRWQQGNVFSCSVMHEALHNHYTQKSLSLSPGK

SEQ ID NO: 867 - protein, 486 aa, synthetic construct; identical to SEQ ID NO: 828
  REGION 1..486: note = Description of Artificial Sequence: Synthetic polypeptide

SEQ ID NO: 868 - protein, 462 aa, synthetic construct
  REGION 1..462: note = Description of Artificial Sequence: Synthetic polypeptide
QVQLQESGPGLVKPSETLSVTCSVSGDSMNNYYWTWIRQSPGKGLEWIGYISDRESATYNPSLNSRVVISRDTSKNQLSLKLNSVTPADTAVYYCATARRGQRIYGVVSFGEFFYYYSMDVWGKGTTVTVSSASTKGPSVFPLAPSSKSTSGGTAALGCLVKDYFPEPVTVSWNSGALTSGVHTFPAVLQSSGLYSLSSVVTVPSSSLGTQTYICNVNHKPSNTKVDKKVEPKSCDKTHTCPPCPAPEAAGGPSVFLFPPKPKDTLMISRTPEVTCVVVDVSHEDPEVKFNWYVDGVEVHNAKTKPREEQYNSTYRVVSVLTVLHQDWLNGKEYKCKVSNKALPASIEKTISKAKGQPREPQVYTLPPSREEMTKNQVSLWCLVKGFYPSDIAVEWESNGQPENNYKTTPPVLDSDGSFFLYSKLTVDKSRWQQGNVFSCSVMHEALHNHYTQKSLSLSPGK

SEQ ID NO: 869 - protein, 486 aa, synthetic construct; identical to SEQ ID NO: 806
  REGION 1..486: note = Description of Artificial Sequence: Synthetic polypeptide

SEQ ID NO: 870 - protein, 486 aa, synthetic construct; identical to SEQ ID NO: 807
  REGION 1..486: note = Description of Artificial Sequence: Synthetic polypeptide

SEQ ID NO: 871 - protein, 486 aa, synthetic construct; identical to SEQ ID NO: 808
  REGION 1..486: note = Description of Artificial Sequence: Synthetic polypeptide

SEQ ID NO: 872 - protein, 462 aa, synthetic construct
  REGION 1..462: note = Description of Artificial Sequence: Synthetic polypeptide
QVQLQESGPGLVKPSETLSVTCSVSGDSMNNYYWTWIRQSPGKGLEWIGYISDRESATYNPSLNSRVVISRDTSKNQLSLKLNSVTPADTAVYYCATARRGQRIYGVVSFGEFFYYYSMDVWGKGTTVTVSSASTKGPSVFPLAPSSKSTSGGTAALGCLVKDYFPEPVTVSWNSGALTSGVHTFPAVLQSSGLYSLSSVVTVPSSSLGTQTYICNVNHKPSNTKVDKKVEPKSCDKTHTCPPCPAPEAAGGPSVFLFPPKPKDTLYITREPEVTCVVVDVSHEDPEVKFNWYVDGVEVHNAKTKPREEQYNSTYRVVSVLTVLHQDWLNGKEYKCKVSNKALPASIEKTISKAKGQPREPQVYTLPPSREEMTKNQVSLWCLVKGFYPSDIAVEWESNGQPENNYKTTPPVLDSDGSFFLYSKLTVDKSRWQQGNVFSCSVMHEALHNHYTQKSLSLSPGK

SEQ ID NO: 873 - protein, 486 aa, synthetic construct; identical to SEQ ID NO: 811
  REGION 1..486: note = Description of Artificial Sequence: Synthetic polypeptide

SEQ ID NO: 874 - protein, 486 aa, synthetic construct; identical to SEQ ID NO: 813
  REGION 1..486: note = Description of Artificial Sequence: Synthetic polypeptide

SEQ ID NO: 875 - protein, 486 aa, synthetic construct; identical to SEQ ID NO: 773
  REGION 1..486: note = Description of Artificial Sequence: Synthetic polypeptide

SEQ ID NO: 876 - protein, 462 aa, synthetic construct
  REGION 1..462: note = Description of Artificial Sequence: Synthetic polypeptide
QVQLQESGPGLVKPSETLSVTCSVSGDSMNNYYWTWIRQSPGKGLEWIGYISDRESATYNPSLNSRVVISRDTSKNQLSLKLNSVTPADTAVYYCATARRGQRIYGVVSFGEFFYYYSMDVWGKGTTVTVSSASTKGPSVFPLAPSSKSTSGGTAALGCLVKDYFPEPVTVSWNSGALTSGVHTFPAVLQSSGLYSLSSVVTVPSSSLGTQTYICNVNHKPSNTKVDKKVEPKSCDKTHTCPPCPAPEAAGGPSVFLFPPKPKDTLMISRTPEVTCVVVDVSHEDPEVKFNWYVDGVEVHNAKTKPREEQYNSTYRVVSVLTVLHQDWLNGKEYKCKVSNKALPASIEKTISKAKGQPREPQVYTLPPSREEMTKNQVSLWCLVKGFYPSDIAVEWESNGQPENNYKTTPPVLDSDGSFFLYSKLTVDKSRWQQGNVFSCSVLHEALHSHYTQKSLSLSPGK

SEQ ID NO: 877 - protein, 486 aa, synthetic construct; identical to SEQ ID NO: 815
  REGION 1..486: note = Description of Artificial Sequence: Synthetic polypeptide

SEQ ID NO: 878 - protein, 486 aa, synthetic construct; identical to SEQ ID NO: 816
  REGION 1..486: note = Description of Artificial Sequence: Synthetic polypeptide

SEQ ID NO: 879 - protein, 486 aa, synthetic construct; identical to SEQ ID NO: 817
  REGION 1..486: note = Description of Artificial Sequence: Synthetic polypeptide

SEQ ID NO: 880 - protein, 486 aa, synthetic construct; identical to SEQ ID NO: 818
  REGION 1..486: note = Description of Artificial Sequence: Synthetic polypeptide

SEQ ID NO: 881 - protein, 486 aa, synthetic construct; identical to SEQ ID NO: 777
  REGION 1..486: note = Description of Artificial Sequence: Synthetic polypeptide

SEQ ID NO: 882 - protein, 462 aa, synthetic construct
  REGION 1..462: note = Description of Artificial Sequence: Synthetic polypeptide
QVHLQESGPGLVTPSETLSLTCTVSNGSVSGRFWSWIRQSPGRGLEWIGYFSDTDRSEYNPSLRSRLTLSVDRSKNQLSLKLKSVTAADSATYYCARAQQGKRIYGIVSFGELFYYYYMDAWGKGTPVTVSSASTKGPSVFPLAPSSKSTSGGTAALGCLVKDYFPEPVTVSWNSGALTSGVHTFPAVLQSSGLYSLSSVVTVPSSSLGTQTYICNVNHKPSNTKVDKKVEPKSCDKTHTCPPCPAPEAAGGPSVFLFPPKPKDTLYITREPEVTCVVVDVSHEDPEVKFNWYVDGVEVHNAKTKPREEQYNSTYRVVSVLTVLHQDWLNGKEYKCKVSNKALPASIEKTISKAKGQPREPQVYTLPPSREEMTKNQVSLSCAVKGFYPSDIAVEWESNGQPENNYKTTPPVLDSDGSFFLVSKLTVDKSRWQQGNVFSCSVMHEALHNHYTQKSLSLSPGK

SEQ ID NO: 883 - protein, 213 aa, synthetic construct
  REGION 1..213: note = Description of Artificial Sequence: Synthetic polypeptide
SLNPLSLAPGATAKIPCGERSRGSRAVQWYQQKPGQAPTLIIYNNQDRPAGVSERFSGNPDVAIGVTATLTISRVEVGDEGDYYCHYWDSRSPISWIFAGGTQLTVLGQPKAAPSVTLFPPSSEELQANKATLVCLISDFYPGAVTVAWKADSSPVKAGVETTTPSKQSNNKYAASSYLSLTPEQWKSHRSYSCQVTHEGSTVEKTVAPTECS

SEQ ID NO: 884 - protein, 462 aa, synthetic construct
  REGION 1..462: note = Description of Artificial Sequence: Synthetic polypeptide
QVHLQESGPGLVTPSETLSLTCTVSNGSVSGRFWSWIRQSPGRGLEWIGYFSDTDRSEYNPSLRSRLTLSVDRSKNQLSLKLKSVTAADSATYYCARAQQGKRIYGIVSFGELFYYYYMDAWGKGTPVTVSSASTKGPSVFPLAPSSKSTSGGTAALGCLVKDYFPEPVTVSWNSGALTSGVHTFPAVLQSSGLYSLSSVVTVPSSSLGTQTYICNVNHKPSNTKVDKKVEPKSCDKTHTCPPCPAPEAAGGPSVFLFPPKPKDTLMISRTPEVTCVVVDVSHEDPEVKFNWYVDGVEVHNAKTKPREEQYNSTYRVVSVLTVLHQDWLNGKEYKCKVSNKALPASIEKTISKAKGQPREPQVYTLPPSREEMTKNQVSLSCAVKGFYPSDIAVEWESNGQPENNYKTTPPVLDSDGSFFLVSKLTVDKSRWQQGNVFSCSVMHEALHNRYTQKSLSLSPGK

SEQ ID NO: 885 - protein, 486 aa, synthetic construct; identical to SEQ ID NO: 779
  REGION 1..486: note = Description of Artificial Sequence: Synthetic polypeptide

SEQ ID NO: 886 - protein, 462 aa, synthetic construct
  REGION 1..462: note = Description of Artificial Sequence: Synthetic polypeptide
QVHLQESGPGLVTPSETLSLTCTVSNGSVSGRFWSWIRQSPGRGLEWIGYFSDTDRSEYNPSLRSRLTLSVDRSKNQLSLKLKSVTAADSATYYCARAQQGKRIYGIVSFGELFYYYYMDAWGKGTPVTVSSASTKGPSVFPLAPSSKSTSGGTAALGCLVKDYFPEPVTVSWNSGALTSGVHTFPAVLQSSGLYSLSSVVTVPSSSLGTQTYICNVNHKPSNTKVDKKVEPKSCDKTHTCPPCPAPEAAGGPSVFLFPPKPKDTLMISRTPEVTCVVVDVSHEDPEVKFNWYVDGVEVHNAKTKPREEQYNSTYRVVSVLTVLHQDWLNGKEYKCKVSNKALPASIEKTISKAKGQPREPQVYTLPPSREEMTKNQVSLSCAVKGFYPSDIAVEWESNGQPENNYKTTPPVLDSDGSFFLVSKLTVDKSRWQQGNVFSCSVMHEALHNHYTQKSLSLSPGK

SEQ ID NO: 887 - protein, 486 aa, synthetic construct; identical to SEQ ID NO: 828
  REGION 1..486: note = Description of Artificial Sequence: Synthetic polypeptide

SEQ ID NO: 888 - protein, 462 aa, synthetic construct
  REGION 1..462: note = Description of Artificial Sequence: Synthetic polypeptide
QVHLQESGPGLVTPSETLSLTCTVSNGSVSGRFWSWIRQSPGRGLEWIGYFSDTDRSEYNPSLRSRLTLSVDRSKNQLSLKLKSVTAADSATYYCARAQQGKRIYGIVSFGELFYYYYMDAWGKGTPVTVSSASTKGPSVFPLAPSSKSTSGGTAALGCLVKDYFPEPVTVSWNSGALTSGVHTFPAVLQSSGLYSLSSVVTVPSSSLGTQTYICNVNHKPSNTKVDKKVEPKSCDKTHTCPPCPAPEAAGGPSVFLFPPKPKDTLMISRTPEVTCVVVDVSHEDPEVKFNWYVDGVEVHNAKTKPREEQYNSTYRVVSVLTVLHQDWLNGKEYKCKVSNKALPASIEKTISKAKGQPREPQVYTLPPSREEMTKNQVSLWCLVKGFYPSDIAVEWESNGQPENNYKTTPPVLDSDGSFFLYSKLTVDKSRWQQGNVFSCSVMHEALHNHYTQKSLSLSPGK

SEQ ID NO: 889 - protein, 486 aa, synthetic construct; identical to SEQ ID NO: 806
  REGION 1..486: note = Description of Artificial Sequence: Synthetic polypeptide

SEQ ID NO: 890 - protein, 486 aa, synthetic construct; identical to SEQ ID NO: 807
  REGION 1..486: note = Description of Artificial Sequence: Synthetic polypeptide

SEQ ID NO: 891 - protein, 486 aa, synthetic construct; identical to SEQ ID NO: 808
  REGION 1..486: note = Description of Artificial Sequence: Synthetic polypeptide

SEQ ID NO: 892 - protein, 462 aa, synthetic construct
  REGION 1..462: note = Description of Artificial Sequence: Synthetic polypeptide
QVHLQESGPGLVTPSETLSLTCTVSNGSVSGRFWSWIRQSPGRGLEWIGYFSDTDRSEYNPSLRSRLTLSVDRSKNQLSLKLKSVTAADSATYYCARAQQGKRIYGIVSFGELFYYYYMDAWGKGTPVTVSSASTKGPSVFPLAPSSKSTSGGTAALGCLVKDYFPEPVTVSWNSGALTSGVHTFPAVLQSSGLYSLSSVVTVPSSSLGTQTYICNVNHKPSNTKVDKKVEPKSCDKTHTCPPCPAPEAAGGPSVFLFPPKPKDTLYITREPEVTCVVVDVSHEDPEVKFNWYVDGVEVHNAKTKPREEQYNSTYRVVSVLTVLHQDWLNGKEYKCKVSNKALPASIEKTISKAKGQPREPQVYTLPPSREEMTKNQVSLWCLVKGFYPSDIAVEWESNGQPENNYKTTPPVLDSDGSFFLYSKLTVDKSRWQQGNVFSCSVMHEALHNHYTQKSLSLSPGK

SEQ ID NO: 893 - protein, 486 aa, synthetic construct; identical to SEQ ID NO: 811
  REGION 1..486: note = Description of Artificial Sequence: Synthetic polypeptide

SEQ ID NO: 894 - protein, 486 aa, synthetic construct; identical to SEQ ID NO: 813
  REGION 1..486: note = Description of Artificial Sequence: Synthetic polypeptide

SEQ ID NO: 895 - protein, 486 aa, synthetic construct; identical to SEQ ID NO: 773
  REGION 1..486: note = Description of Artificial Sequence: Synthetic polypeptide

SEQ ID NO: 896 - protein, 462 aa, synthetic construct
  REGION 1..462: note = Description of Artificial Sequence: Synthetic polypeptide
QVHLQESGPGLVTPSETLSLTCTVSNGSVSGRFWSWIRQSPGRGLEWIGYFSDTDRSEYNPSLRSRLTLSVDRSKNQLSLKLKSVTAADSATYYCARAQQGKRIYGIVSFGELFYYYYMDAWGKGTPVTVSSASTKGPSVFPLAPSSKSTSGGTAALGCLVKDYFPEPVTVSWNSGALTSGVHTFPAVLQSSGLYSLSSVVTVPSSSLGTQTYICNVNHKPSNTKVDKKVEPKSCDKTHTCPPCPAPEAAGGPSVFLFPPKPKDTLMISRTPEVTCVVVDVSHEDPEVKFNWYVDGVEVHNAKTKPREEQYNSTYRVVSVLTVLHQDWLNGKEYKCKVSNKALPASIEKTISKAKGQPREPQVYTLPPSREEMTKNQVSLWCLVKGFYPSDIAVEWESNGQPENNYKTTPPVLDSDGSFFLYSKLTVDKSRWQQGNVFSCSVLHEALHSHYTQKSLSLSPGK

SEQ ID NO: 897 - protein, 486 aa, synthetic construct; identical to SEQ ID NO: 815
  REGION 1..486: note = Description of Artificial Sequence: Synthetic polypeptide

SEQ ID NO: 898 - protein, 486 aa, synthetic construct; identical to SEQ ID NO: 816
  REGION 1..486: note = Description of Artificial Sequence: Synthetic polypeptide

SEQ ID NO: 899 - protein, 486 aa, synthetic construct; identical to SEQ ID NO: 817
  REGION 1..486: note = Description of Artificial Sequence: Synthetic polypeptide

SEQ ID NO: 900 - protein, 486 aa, synthetic construct; identical to SEQ ID NO: 818
  REGION 1..486: note = Description of Artificial Sequence: Synthetic polypeptide

SEQ ID NO: 901 - protein, 455 aa, synthetic construct
  REGION 1..455: note = Description of Artificial Sequence: Synthetic polypeptide
EVQLVESGGGLVQPGGSLSLSCAASGFTFNTYAMNWVRQAPGKGLEWVGRIRSKYNNYATYYADSVKSRFTISRDDSKNSLYLQMNSLRTEDTAVYYCVRHGNFGHSYVSWFAYWGQGTLVTVSSASTKGPSVFPLAPSSKSTSGGTAALGCLVKDYFPEPVTVSWNSGALTSGVHTFPAVLQSSGLYSLSSVVTVPSSSLGTQTYICNVNHKPSNTKVDKKVEPKSCDKTHTCPPCPAPEAAGGPSVFLFPPKPKDTLMISRTPEVTCVVVDVSHEDPEVKFNWYVDGVEVHNAKTKPREEQYNSTYRVVSVLTVLHQDWLNGKEYKCKVSNKALPASIEKTISKAKGQPREPQVYTLPPSREEMTKNQVSLSCAVKGFYPSDIAVEWESNGQPENNYKTTPPVLDSDGSFFLVSKLTVDKSRWQQGNVFSCSVMHEALHNRYTQKSLSLSPGK

SEQ ID NO: 902 - protein, 11 aa, synthetic construct
  REGION 1..11: note = Description of Artificial Sequence: Synthetic peptide
DDDTFTKYWTH

SEQ ID NO: 903 - protein, 17 aa, synthetic construct
  REGION 1..17: note = Description of Artificial Sequence: Synthetic peptide
VISPHFARPIYSYKFRD

SEQ ID NO: 904 - protein, 16 aa, synthetic construct
  REGION 1..16: note = Description of Artificial Sequence: Synthetic peptide
DPFGDRAPHYNYHMDV

SEQ ID NO: 905 - protein, 12 aa, synthetic construct
  REGION 1..12: note = Description of Artificial Sequence: Synthetic peptide
RASQGLDSSHLA

SEQ ID NO: 906 - protein, 7 aa, synthetic construct
  REGION 1..7: note = Description of Artificial Sequence: Synthetic peptide
GTSNRAR

SEQ ID NO: 907 - protein, 9 aa, synthetic construct
  REGION 1..9: note = Description of Artificial Sequence: Synthetic peptide
QRYGGTPIT

SEQ ID NO: 908 - protein, 6 aa, synthetic construct
  REGION 1..6: note = Description of Artificial Sequence: Synthetic peptide
RTELIH

SEQ ID NO: 909 - protein, 17 aa, synthetic construct
  REGION 1..17: note = Description of Artificial Sequence: Synthetic peptide
WVKTVTGAVNFGSPDFR

SEQ ID NO: 910 - protein, 14 aa, synthetic construct
  REGION 1..14: note = Description of Artificial Sequence: Synthetic peptide
QKFYTGGQGWYFDL

SEQ ID NO: 911 - protein, 9 aa, synthetic construct
  REGION 1..9: note = Description of Artificial Sequence: Synthetic peptide
TAASYGHMT

SEQ ID NO: 912 - protein, 7 aa, synthetic construct
  REGION 1..7: note = Description of Artificial Sequence: Synthetic peptide
ATSKRAS

SEQ ID NO: 913 - protein, 5 aa, synthetic construct
  REGION 1..5: note = Description of Artificial Sequence: Synthetic peptide
QQLEF

SEQ ID NO: 914 - protein, 5 aa, synthetic construct
  REGION 1..5: note = Description of Artificial Sequence: Synthetic peptide
GYGMH

SEQ ID NO: 915 - protein, 17 aa, synthetic construct
  REGION 1..17: note = Description of Artificial Sequence: Synthetic peptide
SISHDGIKKYHAEKVWG

SEQ ID NO: 916 - protein, 36 aa, synthetic construct
  REGION 1..36: note = Description of Artificial Sequence: Synthetic polypeptide
DLREDECEEWWSDYYDFGKQLPCAKSRGGLVGIADN

SEQ ID NO: 917 - protein, 13 aa, synthetic construct
  REGION 1..13: note = Description of Artificial Sequence: Synthetic peptide
SGNTSNIGNNFVS

SEQ ID NO: 918 - protein, 7 aa, synthetic construct
  REGION 1..7: note = Description of Artificial Sequence: Synthetic peptide
ETDKRPS

SEQ ID NO: 919 - protein, 12 aa, synthetic construct
  REGION 1..12: note = Description of Artificial Sequence: Synthetic peptide
ATWAASLSSARV

SEQ ID NO: 920 - protein, 7 aa, synthetic construct
  REGION 1..7: note = Description of Artificial Sequence: Synthetic peptide
NDNYYWA

SEQ ID NO: 921 - protein, 16 aa, synthetic construct
  REGION 1..16: note = Description of Artificial Sequence: Synthetic peptide
TIYYSGTTYYNPSLRN

SEQ ID NO: 922 - protein, 18 aa, synthetic construct
  REGION 1..18: note = Description of Artificial Sequence: Synthetic peptide
MPSHGFWSTSFSYWYFDL

SEQ ID NO: 923 - protein, 11 aa, synthetic construct
  REGION 1..11: note = Description of Artificial Sequence: Synthetic peptide
RASQSVTKYLN

SEQ ID NO: 924 - protein, 7 aa, synthetic construct
  REGION 1..7: note = Description of Artificial Sequence: Synthetic peptide
GTYTLLS

SEQ ID NO: 925 - protein, 9 aa, synthetic construct
  REGION 1..9: note = Description of Artificial Sequence: Synthetic peptide
QQAHSTPWT

SEQ ID NO: 926 - protein, 13 aa, synthetic construct
  REGION 1..13: note = Description of Artificial Sequence: Synthetic peptide
DDPYTDDDTFTKY

SEQ ID NO: 927 - protein, 4 aa, synthetic construct
  REGION 1..4: note = Description of Artificial Sequence: Synthetic peptide
PHFA

SEQ ID NO: 928 - protein, 14 aa, synthetic construct
  REGION 1..14: note = Description of Artificial Sequence: Synthetic peptide
PFGDRAPHYNYHMD

SEQ ID NO: 929 - protein, 8 aa, synthetic construct
  REGION 1..8: note = Description of Artificial Sequence: Synthetic peptide
SQGLDSSH

SEQ ID NO: 930 - skipped

SEQ ID NO: 931 - protein, 6 aa, synthetic construct
  REGION 1..6: note = Description of Artificial Sequence: Synthetic peptide
YGGTPI

SEQ ID NO: 932 - protein, 8 aa, synthetic construct
  REGION 1..8: note = Description of Artificial Sequence: Synthetic peptide
EDIFERTE

SEQ ID NO: 933 - protein, 4 aa, synthetic construct
  REGION 1..4: note = Description of Artificial Sequence: Synthetic peptide
TVTG

SEQ ID NO: 934 - protein, 12 aa, synthetic construct
  REGION 1..12: note = Description of Artificial Sequence: Synthetic peptide
KFYTGGQGWYFD

SEQ ID NO: 935 - protein, 5 aa, synthetic construct
  REGION 1..5: note = Description of Artificial Sequence: Synthetic peptide
ASYGH

SEQ ID NO: 936-937 - skipped (2 entries)

SEQ ID NO: 938 - protein, 7 aa, synthetic construct
  REGION 1..7: note = Description of Artificial Sequence: Synthetic peptide
QFRFDGY

SEQ ID NO: 939 - protein, 4 aa, synthetic construct
  REGION 1..4: note = Description of Artificial Sequence: Synthetic peptide
HDGI

SEQ ID NO: 940 - protein, 34 aa, synthetic construct
  REGION 1..34: note = Description of Artificial Sequence: Synthetic polypeptide
LREDECEEWWSDYYDFGKQLPCAKSRGGLVGIAD

SEQ ID NO: 941 - protein, 10 aa, synthetic construct
  REGION 1..10: note = Description of Artificial Sequence: Synthetic peptide
GNTSNIGNNF

SEQ ID NO: 942 - skipped

SEQ ID NO: 943 - protein, 9 aa, synthetic construct
  REGION 1..9: note = Description of Artificial Sequence: Synthetic peptide
WAASLSSAR

SEQ ID NO: 944 - protein, 9 aa, synthetic construct
  REGION 1..9: note = Description of Artificial Sequence: Synthetic peptide
GDSVSNDNY

SEQ ID NO: 945 - skipped

SEQ ID NO: 946 - protein, 16 aa, synthetic construct
  REGION 1..16: note = Description of Artificial Sequence: Synthetic peptide
PSHGFWSTSFSYWYFD

SEQ ID NO: 947 - protein, 7 aa, synthetic construct
  REGION 1..7: note = Description of Artificial Sequence: Synthetic peptide
SQSVTKY

SEQ ID NO: 948 - skipped

SEQ ID NO: 949 - protein, 6 aa, synthetic construct
  REGION 1..6: note = Description of Artificial Sequence: Synthetic peptide
AHSTPW

SEQ ID NO: 950 - protein, 14 aa, synthetic construct
  REGION 1..14: note = Description of Artificial Sequence: Synthetic peptide
DDPYTDDDTFTKYW

SEQ ID NO: 951 - protein, 8 aa, synthetic construct
  REGION 1..8: note = Description of Artificial Sequence: Synthetic peptide
ISPHFARP

SEQ ID NO: 952 - protein, 18 aa, synthetic construct
  REGION 1..18: note = Description of Artificial Sequence: Synthetic peptide
ARDPFGDRAPHYNYHMDV

SEQ ID NO: 953 - protein, 7 aa, synthetic construct
  REGION 1..7: note = Description of Artificial Sequence: Synthetic peptide
QGLDSSH

SEQ ID NO: 954 - protein, 9 aa, synthetic construct
  REGION 1..9: note = Description of Artificial Sequence: Synthetic peptide
EDIFERTEL

SEQ ID NO: 955 - protein, 8 aa, synthetic construct
  REGION 1..8: note = Description of Artificial Sequence: Synthetic peptide
VKTVTGAV

SEQ ID NO: 956 - protein, 16 aa, synthetic construct
  REGION 1..16: note = Description of Artificial Sequence: Synthetic peptide
ARQKFYTGGQGWYFDL

SEQ ID NO: 957 - protein, 4 aa, synthetic construct
  REGION 1..4: note = Description of Artificial Sequence: Synthetic peptide
SYGH

SEQ ID NO: 958 - protein, 8 aa, synthetic construct
  REGION 1..8: note = Description of Artificial Sequence: Synthetic peptide
QFRFDGYG

SEQ ID NO: 959 - protein, 8 aa, synthetic construct
  REGION 1..8: note = Description of Artificial Sequence: Synthetic peptide
ISHDGIKK

SEQ ID NO: 960 - protein, 38 aa, synthetic construct
  REGION 1..38: note = Description of Artificial Sequence: Synthetic polypeptide
AKDLREDECEEWWSDYYDFGKQLPCAKSRGGLVGIADN

SEQ ID NO: 961 - protein, 8 aa, synthetic construct
  REGION 1..8: note = Description of Artificial Sequence: Synthetic peptide
TSNIGNNF

SEQ ID NO: 962 - protein, 10 aa, synthetic construct
  REGION 1..10: note = Description of Artificial Sequence: Synthetic peptide
GDSVSNDNYY

SEQ ID NO: 963 - protein, 7 aa, synthetic construct
  REGION 1..7: note = Description of Artificial Sequence: Synthetic peptide
IYYSGTT

SEQ ID NO: 964 - protein, 20 aa, synthetic construct
  REGION 1..20: note = Description of Artificial Sequence: Synthetic peptide
VRMPSHGFWSTSFSYWYFDL

SEQ ID NO: 965 - protein, 6 aa, synthetic construct
  REGION 1..6: note = Description of Artificial Sequence: Synthetic peptide
QSVTKY

SEQ ID NO: 966 - protein, 16 aa, synthetic construct
  REGION 1..16: note = Description of Artificial Sequence: Synthetic peptide
ADDDPYTDDDTFTKYW

SEQ ID NO: 967 - protein, 17 aa, synthetic construct
  REGION 1..17: note = Description of Artificial Sequence: Synthetic peptide
ISPHFARPIYSYKFRDR

SEQ ID NO: 968 - protein, 15 aa, synthetic construct
  REGION 1..15: note = Description of Artificial Sequence: Synthetic peptide
DPFGDRAPHYNYHMD

SEQ ID NO: 969 - protein, 9 aa, synthetic construct
  REGION 1..9: note = Description of Artificial Sequence: Synthetic peptide
ASQGLDSSH

SEQ ID NO: 970 - protein, 12 aa, synthetic construct
  REGION 1..12: note = Description of Artificial Sequence: Synthetic peptide
GTSNRARGTPDR

SEQ ID NO: 971 - protein, 11 aa, synthetic construct
  REGION 1..11: note = Description of Artificial Sequence: Synthetic peptide
TSEDIFERTEL

SEQ ID NO: 972 - protein, 17 aa, synthetic construct
  REGION 1..17: note = Description of Artificial Sequence: Synthetic peptide
VKTVTGAVNFGSPDFRQ

SEQ ID NO: 973 - protein, 13 aa, synthetic construct
  REGION 1..13: note = Description of Artificial Sequence: Synthetic peptide
QKFYTGGQGWYFD

SEQ ID NO: 974 - protein, 6 aa, synthetic construct
  REGION 1..6: note = Description of Artificial Sequence: Synthetic peptide
AASYGH

SEQ ID NO: 975 - protein, 12 aa, synthetic construct
  REGION 1..12: note = Description of Artificial Sequence: Synthetic peptide
ATSKRASGIPDR

SEQ ID NO: 976 - protein, 10 aa, synthetic construct
  REGION 1..10: note = Description of Artificial Sequence: Synthetic peptide
ASQFRFDGYG

SEQ ID NO: 977 - protein, 17 aa, synthetic construct
  REGION 1..17: note = Description of Artificial Sequence: Synthetic peptide
ISHDGIKKYHAEKVWGR

SEQ ID NO: 978 - protein, 35 aa, synthetic construct
  REGION 1..35: note = Description of Artificial Sequence: Synthetic polypeptide
DLREDECEEWWSDYYDFGKQLPCAKSRGGLVGIAD

SEQ ID NO: 979 - protein, 12 aa, synthetic construct
  REGION 1..12: note = Description of Artificial Sequence: Synthetic peptide
ETDKRPSGIPDR

SEQ ID NO: 980 - protein, 12 aa, synthetic construct
  REGION 1..12: note = Description of Artificial Sequence: Synthetic peptide
VSGDSVSNDNYY

SEQ ID NO: 981 - protein, 16 aa, synthetic construct
  REGION 1..16: note = Description of Artificial Sequence: Synthetic peptide
IYYSGTTYYNPSLRNR

SEQ ID NO: 982 - protein, 17 aa, synthetic construct
  REGION 1..17: note = Description of Artificial Sequence: Synthetic peptide
MPSHGFWSTSFSYWYFD

SEQ ID NO: 983 - protein, 8 aa, synthetic construct
  REGION 1..8: note = Description of Artificial Sequence: Synthetic peptide
ASQSVTKY

SEQ ID NO: 984 - protein, 12 aa, synthetic construct
  REGION 1..12: note = Description of Artificial Sequence: Synthetic peptide
GTYTLLSGVSPR

SEQ ID NO: 985 - protein, 131 aa, synthetic construct
  REGION 1..131: note = Description of Artificial Sequence: Synthetic polypeptide
QGRLFQSGAEVKRPGASVRISCRADDDPYTDDDTFTKYWTHWIRQAPGQRPEWLGVISPHFARPIYSYKFRDRLTLTRDSSLTAVYLELKGLQPDDSGIYFCARDPFGDRAPHYNYHMDVWGGGTAVIVSS

SEQ ID NO: 986 - protein, 112 aa, synthetic construct
  REGION 1..112: note = Description of Artificial Sequence: Synthetic polypeptide
EVVLTQSPAILSVSPGDRVILSCRASQGLDSSHLAWYRFKRGQIPTLVIFGTSNRARGTPDRFSGSGSGADFTLTISRVEPEDFATYYCQRYGGTPITFGGGTTLDKKRTVA

SEQ ID NO: 987 - protein, 125 aa, synthetic construct
  REGION 1..125: note = Description of Artificial Sequence: Synthetic polypeptide
QVQLVQSGSGVKKPGASVRVSCWTSEDIFERTELIHWVRQAPGQGLEWIGWVKTVTGAVNFGSPDFRQRVSLTRDRDLFTAHMDIRGLTQGDTATYFCARQKFYTGGQGWYFDLWGRGTLIVVSS

SEQ ID NO: 988 - protein, 105 aa, synthetic construct
  REGION 1..105: note = Description of Artificial Sequence: Synthetic polypeptide
EIVLTQSPGTLSLSPGETASLSCTAASYGHMTWYQKKPGQPPKLLIFATSKRASGIPDRFSGSQFGKQYTLTITRMEPEDFARYYCQQLEFFGQGTRLEIRRTVA

SEQ ID NO: 989 - protein, 145 aa, synthetic construct
  REGION 1..145: note = Description of Artificial Sequence: Synthetic polypeptide
QVQLVESGGGVVQPGTSLRLSCAASQFRFDGYGMHWVRQAPGKGLEWVASISHDGIKKYHAEKVWGRFTISRDNSKNTLYLQMNSLRPEDTALYYCAKDLREDECEEWWSDYYDFGKQLPCAKSRGGLVGIADNWGQGTMVTVSS

SEQ ID NO: 990 - protein, 111 aa, synthetic construct
  REGION 1..111: note = Description of Artificial Sequence: Synthetic polypeptide
QSVLTQPPSVSAAPGQKVTISCSGNTSNIGNNFVSWYQQRPGRAPQLLIYETDKRPSGIPDRFSASKSGTSGTLAITGLQTGDEADYYCATWAASLSSARVFGTGTKVIVL

SEQ ID NO: 991 - protein, 128 aa, synthetic construct
  REGION 1..128: note = Description of Artificial Sequence: Synthetic polypeptide
EVQLVESGPGLVQPWGTLSLTCRVSGDSVSNDNYYWAWIRQTPGRELQVIGTIYYSGTTYYNPSLRNRVTISLDKSVNVVSLRLGSVSAADTAQYYCVRMPSHGFWSTSFSYWYFDLWGRGHFVAVSW

SEQ ID NO: 992 - protein, 111 aa, synthetic construct
  REGION 1..111: note = Description of Artificial Sequence: Synthetic polypeptide
DIQMTQSPSSLSASVGDKVTITCRASQSVTKYLNWYQFKTGQAPRILIYGTYTLLSGVSPRFSGAGSGSLYTLTITNIQPEDFATYYCQQAHSTPWTFGQGTHVAANRTVA

SEQ ID NO: 993 - protein, 15 aa, Homo sapiens
EPKSCDKTHTCPPCP

SEQ ID NO: 994 - protein, 20 aa, Homo sapiens
EPKSCDKTHTCPPCPAPELL

SEQ ID NO: 995 - DNA, 984 bp, synthetic construct
  misc_feature 1..984: note = Description of Artificial Sequence: Synthetic polynucleotide
  source 1..984: mol_type = other DNA
aagaaagtggtgtacggcaaaaagggcgacaccgtggaactgacctgtaccgccagccagaagaagaacatccagttccactggaagaactccaaccagatcaagatcctgggcaaccagggcagcttcctgaccaagggaccttccaagctgaacgacagagtggactccagacggtccctgtgggaccagggcaactttccactgatcatcaagaacctgaagcctgaggactccgacacctacatctgcgaggtggaagatcagaaagaagaggtgcagctggtcgtcgtcggaggatctgacaagacccacacctgtcctccatgtcctgctccagaagctgctggcggcccttctgtgttcctgtttcctccaaagcctaaggacaccctgtacatcacccgcgagcctgaagtgacctgtgtggtggtggatgtgtcccacgaggaccccgaagtgaagttcaattggtacgtggacggcgtggaagtgcacaacgccaagaccaagcctagagaggaacagtacaacagcacctacagagtggtgtccgtgctgaccgtgctgcaccaggattggctgaacggcaaagagtacaagtgcaaggtgtccaacaaggccctgcctgccagcatcgagaaaaccatcagcaaggccaagggccagcctagggaaccccaggtttacacactgcctccaagccgggaagagatgaccaagaaccaggtgtccctgtggtgcctcgtgaagggcttctacccttccgatatcgccgtggaatgggagagcaatggccagcctgagaacaactacaagacaacccctcctgtgctggacagcgacggctcattcttcctgtacagcaagctgacagtggacaagtccagatggcagcagggcaacgtgttcagctgcagcgtgatgcacgaggccctgcacaaccactacacccagaagtccctgagcctgtctcctggcaaa

SEQ ID NO: 996 - DNA, 1365 bp, synthetic construct
  misc_feature 1..1365: note = Description of Artificial Sequence: Synthetic polynucleotide
  source 1..1365: mol_type = other DNA
gaggtgcagctggtggaatctggcggaggattggttcagcctggcggctctctgagactgtcttgtgccgcttctggcttcaccttcaacacctacgccatgaactgggtccgacaggctcctggcaaaggcctggaatgggtcggacggatccggtccaagtacaacaattacgccacctactacgccgactccgtgaagagcagattcaccatctctcgggacgactccaagaactccctgtacctggagatgaacagcctgcggaccgaggataccgccgtgtactattgtgtgcggcacggcaacttcggccactcctatgtgtcttggtttgcctactggggccagggcacactggtcacagtttcttccgcctctacaaagggccctagtgtgttccctctggctcccagcagcaagtctacatctggcggaacagccgctctgggctgcctggtcaaggattactttcccgagcctgtgaccgtgtcctggaattctggcgctctgacaagcggcgtgcacacctttccagctgtgctgcaaagcagcggcctgtactctctgagcagcgtggtcacagtgcctagctctagcctgggcacccagacctacatctgcaatgtgaaccacaagcctagcaacaccaaggtggacaagaaggtggaacccaagagctgcgacaagacccacacctgtcctccatgtcctgctccagaagctgctggcggcccttccgtgtttctgttccctccaaagcctaaggacaccctgatgatcagcagaacccctgaagtgacctgcgtggtggtggatgtgtcccacgaggatcccgaagtgaagttcaattggtacgtggacggcgtggaagtgcacaacgccaagaccaagcctagagaggaacagtacaacagcacctacagagtggtgtccgtgctgaccgtgctgcaccaggattggctgaacggcaaagagtacaagtgcaaggtgtccaacaaggccctgcctgccagcatcgagaaaaccatcagcaaggccaagggccagcctagggaaccccaggtttacacactgcctccaagccgggaagagatgaccaagaaccaggtgtccctgagctgtgccgtgaagggcttctacccttccgatatcgccgtggaatgggagagcaatggccagcctgagaacaactacaagacaacccctcctgtgctggacagcgacggctcattcttcctggtgtccaagctgacagtggacaagtccagatggcagcagggcaacgtgttcagctgcagcgtgatgcacgaggccctgcacaaccggtacacccagaagtccctgtctctgagccccggcaaa

SEQ ID NO: 997 - DNA, 645 bp, synthetic construct
  misc_feature 1..645: note = Description of Artificial Sequence: Synthetic polynucleotide
  source 1..645: mol_type = other DNA
caagctgttgtgacacaagagcccagcctgacagtgtctcctggcggaacagtgacactgacctgtggatcttctacaggcgccgtgacaaccggccactatgctaattgggtgcagcagaaacccggacaggcccctagaggactgatcggcggaacatctaatagagcccctggcgtgccagccagattttctggatctctgctcggaggcaaggccgctctgacaatttctggcgcccagccagaggatgaggccgagtattattgtgccctgtggtacagcaacagatgggtgttcggcggaggcaccaaactgacagtgctgggacaacctaaggctgcccctagcgtgacactgtttcctccaagctctgaggaactccaggccaacaaggccacactcgtgtgcctgatcagcgatttttaccctggcgctgtgacagtggcctggaaggctgatagctctcctgtgaaagccggcgtggaaaccaccacacctagcaagcagagcaacaacaaatacgccgccagcagctacctgagcctgacacctgagcagtggaagtcccacagatcctacagctgccaagtgacccacgagggcagcaccgtggaaaaaacagtggcccctaccgagtgcagc

SEQ ID NO: 998 - DNA, 984 bp, synthetic construct
  misc_feature 1..984: note = Description of Artificial Sequence: Synthetic polynucleotide
  source 1..984: mol_type = other DNA
aaaaaggtggtgtacggcaagaagggcgacaccgtcgagctgacctgtaccgcctctcagaagaagaacatccagttccactggaagaactccaaccagatcaagatcctgggcaaccagggcagcttcctgaccaagggaccttccaagctgaacgacagagtggactccagacggtccctgtgggaccagggcaactttccactgatcatcaagaacctgaagcctgaggactccgacacctacatctgcgaggtggaagatcagaaagaagaggtgcagctggtcgtcgtcggcggctctgataagacccatacctgtcctccatgtcctgctccagaagctgctggcggcccttccgtgtttctgttccctccaaagcctaaggacaccctgtacatcacccgcgagcctgaagtgacctgcgtggtggtggatgtgtctcacgaggaccccgaagtgaagttcaattggtacgtggacggcgtggaagtgcacaacgccaagaccaagcctagagaggaacagtacaactccacctacagagtggtgtccgtgctgaccgtgctgcaccaggattggctgaacggcaaagagtacaagtgcaaggtgtccaacaaggccctgcctgcctccatcgaaaagaccatctccaaggccaagggccagcctagggaaccccaggtttacaccctgccacctagccgggaagagatgaccaagaaccaggtgtcactgtggtgcctggtcaagggcttctacccctctgatatcgccgtggaatgggagagcaatggccagcctgagaacaactacaagaccacacctcctgtgctggacagcgacggctcattcttcctgtacagcaagctgacagtggacaagtccagatggcagcagggcaacgtgttctcctgctccgtgatgcacgaggccctgcacaatcactacacccagaagtccctgtctctgtcccctggcaaa

SEQ ID NO: 999 - DNA, 1365 bp, synthetic construct
  misc_feature 1..1365: note = Description of Artificial Sequence: Synthetic polynucleotide
  source 1..1365: mol_type = other DNA
gaggtgcagctggtggaatctggcggaggattggttcagcctggcggctctctgagactgtcttgtgccgcttctggcttcaccttcaacacctacgctatgaactgggtccgacaggcccctggcaaaggactggaatgggtcggacggatccggtccaagtacaacaactacgccacctactacgccgactccgtgaagtcccggttcaccatctctcgggacgactccaagaactccctgtacctggaaatgaacagcctgcggaccgaggacaccgccgtgtattattgtgtgcggcacggcaacttcggccactcctatgtgtcttggtttgcctactggggccagggcacactggtcacagtttcttccgcctccaccaagggacccagcgttttccctctggctccatcctccaagtctacctctggcggaacagctgctctgggctgcctggtcaaggactactttcctgagcctgtgaccgtgtcctggaactctggcgctctgacatctggcgtgcacacctttccagctgtgctgcagtcctccggcctgtactctctgtcctctgtcgtgaccgtgccttccagctctctgggaacccagacctacatctgcaatgtgaaccacaagccttccaacaccaaggtggacaagaaggtggaacccaagtcctgcgacaagacccacacctgtcctccatgtcctgctccagaagctgctggcggcccttccgtgtttctgttccctccaaagcctaaggacaccctgatgatctctcggacccctgaagtgacctgcgtggtggtggatgtgtctcacgaggatcccgaagtgaagttcaattggtacgtggacggcgtggaagtgcacaacgccaagaccaagcctagagaggaacagtacaactccacctacagagtggtgtccgtgctgaccgtgctgcaccaggattggctgaacggcaaagagtacaagtgcaaggtgtccaacaaggccctgcctgcctccatcgaaaagaccatctccaaggccaagggccagcctagggaaccccaggtttacaccctgccacctagccgggaagagatgaccaagaaccaggtgtccctgtcctgtgccgtgaagggcttctacccttccgatatcgccgtggaatgggagagcaatggccagcctgagaacaactacaagacaacccctcctgtgctggactccgacggctcattcttcctggtgtccaagctgacagtggacaagtctagatggcagcagggcaacgtgttctcctgctccgtgatgcacgaggccctgcacaacagatacacccagaagtccctgtctctgagccccggaaaa

SEQ ID NO: 1000 - DNA, 645 bp, synthetic construct
  misc_feature 1..645: note = Description of Artificial Sequence: Synthetic polynucleotide
  source 1..645: mol_type = other DNA
caggccgtggtcacccaagagcctagcctgacagtttctcctggcggcaccgtgacactgacctgtggatcttctaccggcgctgtgaccaccggccactacgctaattgggtgcagcagaagcctggacaggctcccagaggactgatcggcggcacctctaatagagcacctggcgtgccagccagattctccggatctctgcttggcggaaaggccgctctgacaatctctggtgctcagcctgaggacgaggccgagtactattgtgccctgtggtactccaacagatgggtgttcggcggaggcaccaagctgacagttctgggacagcctaaggctgccccttccgtgactctgttccctccatcctctgaggaactgcaggccaacaaggctaccctcgtgtgcctgatctccgacttttaccctggcgccgtgaccgtggcttggaaggctgatagttctcctgtgaaggccggcgtggaaaccaccacacctagcaagcagtccaacaacaaatacgccgcctcctcctacctgtctctgacccctgaacagtggaagtcccaccggtcctacagctgccaagtgacccatgagggctccaccgtggaaaagacagtggcccctaccgagtgctct

SEQ ID NO: 1001 - DNA, 984 bp, synthetic construct
  misc_feature 1..984: note = Description of Artificial Sequence: Synthetic polynucleotide
  source 1..984: mol_type = other DNA
aagaaagtggtgtacggcaaaaagggcgacaccgtggaactgacctgtaccgccagccagaagaagaacatccagttccactggaagaactccaaccagatcaagatcctgggcaaccagggcagcttcctgaccaagggaccttccaagctgaacgacagagtggactccagacggtccctgtgggaccagggcaactttccactgatcatcaagaacctgaagcctgaggactccgacacctacatctgcgaggtggaagatcagaaagaagaggtgcagctggtcgtcgtcggaggatctgacaagacccacacctgtcctccatgtcctgctccagaagctgctggcggcccttccgtgtttctgttccctccaaagcctaaggacaccctgatgatcagcagaacccctgaagtgacctgcgtggtggtggatgtgtcccacgaggatcccgaagtgaagttcaattggtacgtggacggcgtggaagtgcacaacgccaagaccaagcctagagaggaacagtacaacagcacctacagagtggtgtccgtgctgaccgtgctgcaccaggattggctgaacggcaaagagtacaagtgcaaggtgtccaacaaggccctgcctgccagcatcgagaaaaccatcagcaaggccaagggccagcctagggaaccccaggtttacacactgcctccaagccgggaagagatgaccaagaaccaggtgtccctgagctgtgccgtgaagggcttctacccttccgatatcgccgtggaatgggagagcaatggccagcctgagaacaactacaagacaacccctcctgtgctggacagcgacggctcattcttcctggtgtccaagctgacagtggacaagtccagatggcagcagggcaacgtgttcagctgcagcgtgatgcacgaggccctgcacaaccggtacacccagaagtccctgtctctgagccccggcaaa

SEQ ID NO: 1002 - DNA, 1365 bp, synthetic construct
  misc_feature 1..1365: note = Description of Artificial Sequence: Synthetic polynucleotide
  source 1..1365: mol_type = other DNA
gaggtgcagctggtggaatctggcggaggattggttcagcctggcggctctctgagactgtcttgtgccgcttctggcttcaccttcaacacctacgccatgaactgggtccgacaggctcctggcaaaggcctggaatgggtcggacggatccggtccaagtacaacaattacgccacctactacgccgactccgtgaagggcagattcaccatctctcgggacgactccaagaactccctgtacctgcagatgaacagcctgcggaccgaggataccgccgtgtactattgtgtgcggcacggcaacttcggccactcctatgtgtcttggtttgcctactggggccagggcacactggtcacagtttcttccgctagcaccaagggcccctccgtgtttccactggctcctagcagcaagagcacaagcggaggaacagccgctctgggctgtctggtcaaggactactttcccgagcctgtgaccgtgtcctggaattctggcgctctgacaagcggcgtgcacacctttccagctgtgctgcaaagcagcggcctgtactctctgagcagcgtggtcacagtgccaagctctagcctgggcacccagacctacatctgcaatgtgaaccacaagcctagcaacaccaaggtggacaagaaggtggaacccaagagctgcgacaagacccacacctgtcctccatgtcctgctccagaagctgctggcggcccttctgtgttcctgtttcctccaaagcctaaggacaccctgtacatcacccgcgagcctgaagtgacctgtgtggtggtggatgtgtcccacgaggaccccgaagtgaagttcaattggtacgtggacggcgtggaagtgcacaacgccaagaccaagcctagagaggaacagtacaacagcacctacagagtggtgtccgtgctgaccgtgctgcaccaggattggctgaacggcaaagagtacaagtgcaaggtgtccaacaaggccctgcctgccagcatcgagaaaaccatcagcaaggccaagggccagcctagggaaccccaggtttacacactgcctccaagccgggaagagatgaccaagaaccaggtgtccctgtggtgcctcgtgaagggcttctacccttccgatatcgccgtggaatgggagagcaatggccagcctgagaacaactacaagacaacccctcctgtgctggacagcgacggctcattcttcctgtacagcaagctgacagtggacaagtccagatggcagcagggcaacgtgttcagctgcagcgtgatgcacgaggccctgcacaaccactacacccagaagtccctgagcctgtctcctggcaaa

SEQ ID NO: 1003 - DNA, 585 bp, synthetic construct
  misc_feature 1..585: note = Description of Artificial Sequence: Synthetic polynucleotide
  source 1..585: mol_type = other DNA
caagctgttgtgacacaagagcccagcctgacagtgtctcctggcggaacagtgacactgacctgtggatcttctacaggcgccgtgacaaccggccactatgctaattgggtgcagcagaaacccggacaggcccctagaggactgatcggcggaacatctaatagagcccctggcgtgccagccagattttctgccgagtattattgtgccctgtggtacagcaacagatgggtgttcggcggaggcaccaaactgacagtgctgggacaacctaaggctgcccctagcgtgacactgtttcctccaagctctgaggaactccaggccaacaaggccacactcgtgtgcctgatcagcgatttttaccctggcgctgtgacagtggcctggaaggctgatagctctcctgtgaaagccggcgtggaaaccaccacacctagcaagcagagcaacaacaaatacgccgccagcagctacctgagcctgacacctgagcagtggaagtcccacagatcctacagctgccaagtgacccacgagggcagcaccgtggaaaaaacagtggcccctaccgagtgcagc

SEQ ID NO: 1004 - DNA, 984 bp, synthetic construct
  misc_feature 1..984: note = Description of Artificial Sequence: Synthetic polynucleotide
  source 1..984: mol_type = other DNA
aaaaaggtggtgtacggcaagaagggcgacaccgtcgagctgacctgtaccgcctctcagaagaagaacatccagttccactggaagaactccaaccagatcaagatcctgggcaaccagggcagcttcctgaccaagggaccttccaagctgaacgacagagtggactccagacggtccctgtgggaccagggcaactttccactgatcatcaagaacctgaagcctgaggactccgacacctacatctgcgaggtggaagatcagaaagaagaggtgcagctggtcgtcgtcggcggctctgataagacccatacctgtcctccatgtcctgctccagaagctgctggcggcccttccgtgtttctgttccctccaaagcctaaggacaccctgatgatctctcggacccctgaagtgacctgcgtggtggtggatgtgtctcacgaggatcccgaagtgaagttcaattggtacgtggacggcgtggaagtgcacaacgccaagaccaagcctagagaggaacagtacaactccacctacagagtggtgtccgtgctgaccgtgctgcaccaggattggctgaacggcaaagagtacaagtgcaaggtgtccaacaaggccctgcctgcctccatcgaaaagaccatctccaaggccaagggccagcctagggaaccccaggtttacaccctgccacctagccgggaagagatgaccaagaaccaggtgtccctgtcctgtgccgtgaagggcttctacccttccgatatcgccgtggaatgggagagcaatggccagcctgagaacaactacaagaccacacctcctgtgctggacagcgacggctcattcttcctggtgtctaagctgacagtggacaagtccagatggcagcagggcaacgtgttctcctgctccgtgatgcacgaggccctgcacaacagatacacccagaagtccctgagcctgtctcctggcaaa

SEQ ID NO: 1005 - DNA, 1311 bp, synthetic construct
  misc_feature 1..1311: note = Description of Artificial Sequence: Synthetic polynucleotide
  source 1..1311: mol_type = other DNA
gaggtgcagctggtggaatctggcggaggattggttcagcctggcggctctctgagactgtcttgtgccgcttctggcttcaccttcaacacctacgctatgaactgggtccgacaggcccctggcaaaggactggaatgggtcggacggatccggtccaagtacaacaactacgccacctactacgccgactccgtgaagggcagattcaccatctctcgggacgactccaagaactccctgtacctgcagatgaacagcctgcggaccgaggataccgccgtgtactattgtgtgcggcacggcaacttcggccactcctatgtgtcttggtttgcctactggggccagggcacactggtcacagtttcttccgcctccaccaagggacccagcgttttccctctggctccatcctccaagtctacctctggcggaacatggaactctggcgctctgacatctggcgtgcacacctttccagctgtgctgcagtcctccggcctgtactctctgtcctctgtcgtgaccgtgccttccagctctctgggaacccagacctacatctgcaatgtgaaccacaagccttccaacaccaaggtggacaagaaggtggaacccaagtcctgcgacaagacccacacctgtcctccatgtcctgctccagaagctgctggcggcccttccgtgtttctgttccctccaaagcctaaggacaccctgtacatcacccgcgagcctgaagtgacctgcgtggtggtggatgtgtctcacgaggaccccgaagtgaagttcaattggtacgtggacggcgtggaagtgcacaacgccaagaccaagcctagagaggaacagtacaactccacctacagagtggtgtccgtgctgaccgtgctgcaccaggattggctgaacggcaaagagtacaagtgcaaggtgtccaacaaggccctgcctgcctccatcgaaaagaccatctccaaggccaagggccagcctagggaaccccaggtttacaccctgccacctagccgggaagagatgaccaagaaccaggtgtccctgtggtgcctggttaagggcttctacccctccgatatcgccgtggaatgggagtctaatggccagcctgagaacaactacaagacaacccctcctgtgctggactccgacggctcattcttcctgtactccaagctgacagtggacaagtccagatggcagcagggcaacgtgttctcctgctccgtgatgcacgaggccctgcacaatcactacacccagaagtccctgtctctgagccctggcaag

SEQ ID NO: 1006 - DNA, 984 bp, synthetic construct
  misc_feature 1..984: note = Description of Artificial Sequence: Synthetic polynucleotide
  source 1..984: mol_type = other DNA
aagaaagtggtgtacggcaaaaagggcgacaccgtggaactgacctgtaccgccagccagaagaagaacatccagttccactggaagaactccaaccagatcaagatcctgggcaaccagggcagcttcctgaccaagggaccttccaagctgaacgacagagtggactccagacggtccctgtgggaccagggcaactttccactgatcatcaagaacctgaagcctgaggactccgacacctacatctgcgaggtggaagatcagaaagaagaggtgcagctggtcgtcgtcggaggatctgacaagacccacacctgtcctccatgtcctgctccagaagctgctggcggcccttccgtgtttctgttccctccaaagcctaaggacaccctgtacatcacccgcgagcctgaagtgacctgcgtggtggtggatgtgtcccacgaggatcccgaagtgaagttcaattggtacgtggacggcgtggaagtgcacaacgccaagaccaagcctagagaggaacagtacaacagcacctacagagtggtgtccgtgctgaccgtgctgcaccaggattggctgaacggcaaagagtacaagtgcaaggtgtccaacaaggccctgcctgccagcatcgagaaaaccatcagcaaggccaagggccagcctagggaaccccaggtttacacactgcctccaagccgggaagagatgaccaagaaccaggtgtccctgagctgtgccgtgaagggcttctacccttccgatatcgccgtggaatgggagagcaatggccagcctgagaacaactacaagacaacccctcctgtgctggacagcgacggctcattcttcctggtgtccaagctgacagtggacaagtccagatggcagcagggcaacgtgttcagctgcagcgtgatgcacgaggccctgcacaaccactacacccagaagtccctgtctctgagccccggcaaa

SEQ ID NO: 1007 - DNA, 984 bp, synthetic construct
  misc_feature 1..984: note = Description of Artificial Sequence: Synthetic polynucleotide
  source 1..984: mol_type = other DNA
aaaaaggtggtgtacggcaagaagggcgacaccgtcgagctgacctgtaccgcctctcagaagaagaacatccagttccactggaagaactccaaccagatcaagatcctgggcaaccagggcagcttcctgaccaagggaccttccaagctgaacgacagagtggactccagacggtccctgtgggaccagggcaactttccactgatcatcaagaacctgaagcctgaggactccgacacctacatctgcgaggtggaagatcagaaagaagaggtgcagctggtcgtcgtcggcggctctgataagacccatacctgtcctccatgtcctgctccagaagctgctggcggcccttccgtgtttctgttccctccaaagcctaaggacaccctgtacatcacccgcgagcctgaagtgacctgcgtggtggtggatgtgtctcacgaggaccccgaagtgaagttcaattggtacgtggacggcgtggaagtgcacaacgccaagaccaagcctagagaggaacagtacaactccacctacagagtggtgtccgtgctgaccgtgctgcaccaggattggctgaacggcaaagagtacaagtgcaaggtgtccaacaaggccctgcctgcctccatcgaaaagaccatctccaaggccaagggccagcctagggaaccccaggtttacaccctgccacctagccgggaagagatgaccaagaaccaggtgtccctgtcctgtgccgtgaagggcttctacccttccgatatcgccgtggaatgggagagcaatggccagcctgagaacaactacaagaccacacctcctgtgctggacagcgacggctcattcttcctggtgtctaagctgacagtggacaagtccagatggcagcagggcaacgtgttctcctgctccgtgatgcacgaggccctgcacaatcactacacccagaagtccctgagcctgtctcctggcaaa

SEQ ID NO: 1008 - DNA, 1365 bp, synthetic construct
  misc_feature 1..1365: note = Description of Artificial Sequence: Synthetic polynucleotide
  source 1..1365: mol_type = other DNA
gaggtgcagctggtggaatctggcggaggattggttcagcctggcggctctctgagactgtcttgtgccgcttctggcttcaccttcaacacctacgctatgaactgggtccgacaggcccctggcaaaggactggaatgggtcggacggatccggtccaagtacaacaactacgccgcctactacgccgactccgtgaagtccagattcaccatctctcgggacgactccaagaactccctgtacctgcagatgaacagcctgcggaccgaggataccgccgtgtactattgtgtgcggcacggcaacttcggccactcctatgtgtcttggtttgcctactggggccagggcacactggtcacagtttcttccgcctccaccaagggacccagcgttttccctctggctccatcctccaagtctacctctggcggaacagctgctctgggctgcctggtcaaggactactttcctgagcctgtgaccgtgtcctggaactctggcgctctgacatctggcgtgcacacctttccagctgtgctgcagtcctccggcctgtactctctgtcctctgtcgtgaccgtgccttccagctctctgggaacccagacctacatctgcaatgtgaaccacaagccttccaacaccaaggtggacaagaaggtggaacccaagtcctgcgacaagacccacacctgtcctccatgtcctgctccagaagctgctggcggcccttccgtgtttctgttccctccaaagcctaaggacaccctgatgatctctcggacccctgaagtgacctgcgtggtggtggatgtgtctcacgaggatcccgaagtgaagttcaattggtacgtggacggcgtggaagtgcacaacgccaagaccaagcctagagaggaacagtacaactccacctacagagtggtgtccgtgctgaccgtgctgcaccaggattggctgaacggcaaagagtacaagtgcaaggtgtccaacaaggccctgcctgcctccatcgaaaagaccatctccaaggccaagggccagcctagggaaccccaggtttacaccctgccacctagccgggaagagatgaccaagaaccaggtgtccctgtcctgtgccgtgaagggcttctacccttccgatatcgccgtggaatgggagagcaatggccagcctgagaacaactacaagacaacccctcctgtgctggactccgacggctcattcttcctggtgtccaagctgacagtggacaagtccaggtggcagcagggcaacgtgttctcctgctctgtgatgcacgaggccctgcacaaccggtacacccagaagtctctgtctctgagccctggcaag

SEQ ID NO: 1009 - DNA, 1365 bp, synthetic construct
  misc_feature 1..1365: note = Description of Artificial Sequence: Synthetic polynucleotide
  source 1..1365: mol_type = other DNA
gaggtgcagctggtggaatctggcggaggattggttcagcctggcggctctctgtctctgtcttgtgccgcttctggcttcaccttcaacacctacgctatgaactgggtccgacaggcccctggcaaaggactggaatgggtcggacggatccggtccaagtacaacaactacgccacctactacgccgactccgtgaagtcccggttcaccatctctcgggacgactccaagaactccctgtacctgcagatgaacagcctgcggaccgaggataccgccgtgtactattgtgtgcggcacggcaacttcggccactcctatgtgtcttggtttgcctactggggccagggcacactggtcacagtttcttccgcctccaccaagggacccagcgttttccctctggctccatcctccaagtctacctctggcggaacagctgctctgggctgcctggtcaaggactactttcctgagcctgtgaccgtgtcctggaactctggcgctctgacatctggcgtgcacacctttccagctgtgctgcagtcctccggcctgtacagtctgtcctctgtcgtgaccgtgccttccagctctctgggaacccagacctacatctgcaatgtgaaccacaagccttccaacaccaaggtggacaagaaggtggaacccaagtcctgcgacaagacccacacctgtcctccatgtcctgctccagaagctgctggcggcccttccgtgtttctgttccctccaaagcctaaggacaccctgatgatctctcggacccctgaagtgacctgcgtggtggtggatgtgtctcacgaggatcccgaagtgaagttcaattggtacgtggacggcgtggaagtgcacaacgccaagaccaagcctagagaggaacagtacaactccacctacagagtggtgtccgtgctgaccgtgctgcaccaggattggctgaacggcaaagagtacaagtgcaaggtgtccaacaaggccctgcctgcctccatcgaaaagaccatctccaaggccaagggccagcctagggaaccccaggtttacaccctgccacctagccgggaagagatgaccaagaaccaggtgtccctgtcctgcgccgtgaagggcttctacccttctgatatcgccgtggaatgggagagcaacggccagcctgagaacaactacaagacaacccctcctgtgctggactccgacggctcattcttcctggtgtccaagctgacagtggacaagtctagatggcagcagggcaacgtgttctcctgctccgtgatgcacgaggccctgcacaacagatacacccagaagtccctgtctctgagccccggaaaa

SEQ ID NO: 1010 - DNA, 1458 bp, synthetic construct
  misc_feature 1..1458: note = Description of Artificial Sequence: Synthetic polynucleotide
  source 1..1458: mol_type = other DNA
gaggtgcagctggtggaatctggcggaggattggttcagcctggcggctctctgagactgtcttgtgccgcttctggcttcaccttcaacacctacgccatgaactgggtccgacaggctcctggcaaaggcctggaatgggtcggacggatccggtccaagtacaacaattacgccacctactacgccgactccgtgaagggcagattcaccatctctcgggacgactccaagaactccctgtacctgcagatgaacagcctgcggaccgaggataccgccgtgtactattgtgtgcggcacggcaacttcggccactcctatgtgtcttggtttgcctactggggccagggcacactggtcacagtttcttccggcggaggtggaagcggaggcggaggtagtggcggtggtggttcaggtggtggtggatctcaggctgtggttacccaggagcctagcctgacagtttctcctggcggcaccgtgacactgacctgtggatcttctaccggcgctgtgaccaccggccattacgctaattgggtgcagcagaagcctggacaggccccaagaggactgatcggcggcacatctaacagagcccctggcgtcccagccagattctctggatctctgcttggcggcaaggccgctctgacaatttctggtgctcagcctgaggacgaggccgagtactactgtgccctgtggtactccaacagatgggtgttcggcggaggcaccaagctgacagtgttggagcccaaatcttcagacaagacccacacctgtcctccatgtcctgctccagaagctgctggcggcccttctgtgttcctgtttcctccaaagcctaaggacaccctgtacatcacccgcgagcctgaagtgacctgtgtggtggtggatgtgtcccacgaggaccccgaagtgaagttcaattggtacgtggacggcgtggaagtgcacaacgccaagaccaagcctagagaggaacagtacaacagcacctacagagtggtgtccgtgctgaccgtgctgcaccaggattggctgaacggcaaagagtacaagtgcaaggtgtccaacaaggccctgcctgccagcatcgagaaaaccatcagcaaggccaagggccagcctagggaaccccaggtttacacactgcctccaagccgggaagagatgaccaagaaccaggtgtccctgtggtgcctcgtgaagggcttctacccttccgatatcgccgtggaatgggagagcaatggccagcctgagaacaactacaagacaacccctcctgtgctggacagcgacggctcattcttcctgtacagcaagctgacagtggacaagtccagatggcagcagggcaacgtgttcagctgcagcgtgatgcacgaggccctgcacaaccactacacccagaagtccctgagcctgtctcctggcaaa

SEQ ID NO: 1011 - DNA, 1359 bp, synthetic construct
  misc_feature 1..1359: note = Description of Artificial Sequence: Synthetic polynucleotide
  source 1..1359: mol_type = other DNA
caggtgcagctgctgcagtctggcgccgctgtgacaaaaccaggcgcttctgtgcgggtgtcctgcgaggccagcggctacaacatccgggactacttcattcactggtggcgccaggcccctggacagggactgcagtgggtgggatggatcaaccccaagaccggccagcccaacaaccccagacagttccagggcagagtgtccctgaccagacacgccagcttcgacttcgacaccttcagcttctacatggacctgaaggccctgcggagcgacgataccgccgtgtacttctgcgccagacagagaagcgactactgggatttcgacgtgtggggcagcggcacccaagtgaccgtgtcatctgcctctacaaagggccctagtgtgttccctctggctcccagcagcaagtctacatctggcggaacagccgctctgggctgcctggtcaaggattactttcccgagcctgtgaccgtgtcctggaattctggcgctctgacaagcggcgtgcacacctttccagctgtgctgcaaagcagcggcctgtactctctgagcagcgtggtcacagtgcctagctctagcctgggcacccagacctacatctgcaatgtgaaccacaagcctagcaacaccaaggtggacaagaaggtggaacccaagagctgcgacaagacccacacctgtcctccatgtcctgctccagaagctgctggcggcccttccgtgtttctgttccctccaaagcctaaggacaccctgtacatcacccgcgagcctgaagtgacctgcgtggtggtggatgtgtcccacgaggatcccgaagtgaagttcaattggtacgtggacggcgtggaagtgcacaacgccaagaccaagcctagagaggaacagtacaacagcacctacagagtggtgtccgtgctgaccgtgctgcaccaggattggctgaacggcaaagagtacaagtgcaaggtgtccaacaaggccctgcctgccagcatcgagaaaaccatcagcaaggccaagggccagcctagggaaccccaggtttacacactgcctccaagccgggaagagatgaccaagaaccaggtgtccctgagctgtgccgtgaagggcttctacccttccgatatcgccgtggaatgggagagcaatggccagcctgagaacaactacaagacaacccctcctgtgctggacagcgacggctcattcttcctggtgtccaagctgacagtggacaagtccagatggcagcagggcaacgtgttcagctgcagcgtgatgcacgaggccctgcacaaccactacacccagaagtccctgtctctgagccccggcaaa

SEQ ID NO: 1012 - DNA, 618 bp, synthetic construct
  misc_feature 1..618: note = Description of Artificial Sequence: Synthetic polynucleotide
  source 1..618: mol_type = other DNA
gatattcagatgacacagagccccagtagcctgagcgccagcgtgggcgacaccgcaaccatcacctgtcaggccaacggctatctgaactggtatcaacagaggaggggcaaggcccccaagctcctgatatacgacggcagcaagctggagaggggcgttcccagccgcttcagcggcaggaggtggggccaggagtacaaccttacaatcaacaacctgcagcccgaggacatcgccacctatttctgccaagtttacgagttcgtggtgcccggcaccaggctggacctgaagcggaccgtggccgcccccagcgtgttcatcttccctcccagcgacgagcagctgaagtctggcaccgccagcgtggtgtgcctgctgaacaacttctacccccgcgaggccaaggtgcagtggaaggtggacaacgccctgcagagcggcaacagccaggagagcgtgaccgagcaggactccaaggacagcacctacagcctgagcagcaccctgaccctgagcaaggccgactacgagaagcacaaggtgtacgcctgcgaggtgacccaccagggactgtctagccccgtgaccaagagcttcaaccggggcgagtgc

SEQ ID NO: 1013 - DNA, 1458 bp, synthetic construct
  misc_feature 1..1458: note = Description of Artificial Sequence: Synthetic polynucleotide
  source 1..1458: mol_type = other DNA
gaggtgcagctggtggaatctggcggaggattggttcagcctggcggctctctgagactgtcttgtgccgcttctggcttcaccttcaacacctacgctatgaactgggtccgacaggcccctggcaaaggactggaatgggtcggacggatccggtccaagtacaacaactacgccacctactacgccgactccgtgaagggcagattcaccatctctcgggacgactccaagaactccctgtacctgcagatgaacagcctgcggaccgaggataccgccgtgtactattgtgtgcggcacggcaacttcggccactcctatgtgtcttggtttgcctactggggccagggcacactggtcacagtttctagcggcggaggtggaagcggaggcggaggtagtggtggtggcggatctggtggcggtggatctcaggctgtggtcacccaagagcctagcctgacagtttctcctggcggcaccgtgacactgacctgtggatcttctaccggcgctgtgaccaccggccactacgctaattgggtgcagcagaagcctggacaggctcccagaggactgatcggcggcacctctaatagagcacctggcgtgccagccagattctctggatctctgctcggcggaaaggccgctctgacaatttctggtgcccagcctgaggacgaggccgagtattattgtgccctgtggtactccaaccgctgggttttcggcggaggcaccaagctgacagtgctggaacctaagtcctccgacaagacccacacctgtcctccatgtcctgctccagaagctgctggcggcccttccgtgtttctgttccctccaaagcctaaggacaccctgtacatcacccgcgagcctgaagtgacctgcgtggtggtcgatgtgtctcacgaggaccccgaagtgaagttcaattggtacgtggacggcgtggaagtgcacaacgccaagaccaagcctagagaggaacagtacaactccacctacagagtggtgtccgtgctgaccgtgctgcaccaggattggctgaacggcaaagagtacaagtgcaaggtgtccaacaaggccctgcctgcctccatcgaaaagaccatctccaaggccaagggccagcctagggaaccccaggtttacaccctgccacctagccgggaagagatgaccaagaaccaggtgtccctgtggtgcctggtcaagggcttctacccttccgatatcgccgtggaatgggagagcaacggacagcccgagaacaactacaagacaacccctcctgtgctggactccgacggctcattcttcctgtacagcaagctgactgtggacaagtccagatggcagcagggcaacgtgttctcctgctccgtgatgcacgaggccctgcacaatcactacacccagaagtccctgtctctgagccctggcaag

SEQ ID NO: 1014 - DNA, 1359 bp, synthetic construct
  misc_feature 1..1359: note = Description of Artificial Sequence: Synthetic polynucleotide
  source 1..1359: mol_type = other DNA
caggtgcagctgttgcaatctggcgccgctgtgacaaagcctggtgcctctgttagagtgtcctgcgaggcctccggctacaacatccgggactacttcatccactggtggcggcaggctccaggacagggattgcaatgggtcggatggatcaaccccaagaccggccagcctaacaaccctagacagttccagggcagagtgtctctgacccggcacgcctctttcgacttcgacaccttcagcttctacatggacctgaaggccctgcggagcgacgataccgccgtgtacttttgcgccagacagagatccgactactgggacttcgacgtgtggggctctggcacccaagtgacagtgtcctccgcttccaccaagggaccctctgtgtttcctctggctccctccagcaagtctacctctggtggaacagctgctctgggctgcctggtcaaggattacttccctgagcctgtgaccgtgtcctggaattctggcgctctgacatccggcgtgcacacctttccagctgtgctgcaatcctccggcctgtactctctgtcctccgtcgtgaccgtgccttctagctctctgggcacccagacctacatctgcaatgtgaaccacaagccttccaacaccaaggtggacaagaaggtggaacccaagtcctgcgacaagacccacacctgtcctccatgtcctgctccagaagctgctggcggcccatccgtgtttctgttccctccaaagcctaaggacaccctgtacatcacccgcgagcctgaagtgacctgcgtggtggtggatgtgtctcacgaggaccccgaagtgaagttcaattggtacgtggacggcgtggaagtgcacaacgccaagaccaagcctagagaggaacagtacaactccacctacagagtggtgtccgtgctgaccgtgctgcaccaggattggctgaacggcaaagagtacaagtgcaaggtgtccaacaaggctctgcccgcctccatcgaaaagaccatctccaaggctaagggccagcctcgggaaccccaggtttacacattgcctccaagccgggaagagatgaccaagaaccaggtgtccctgagctgcgccgtgaagggcttctacccttctgatatcgccgtggaatgggagtccaacggccagccagagaacaactacaagacaacccctcctgtgctggactccgacggctcattcttcctggtgtctaagctgacagtggacaagtccagatggcagcagggcaacgtgttctcctgctccgtgatgcacgaggccctgcacaatcactacacccagaagtccctgtctctgtcccctggcaaa

SEQ ID NO: 1015 - DNA, 618 bp, synthetic construct
  misc_feature 1..618: note = Description of Artificial Sequence: Synthetic polynucleotide
  source 1..618: mol_type = other DNA
gacatccagatgacccagtctccatcctctctgtccgcctctgtgggcgataccgctaccattacctgtcaggccaacggctacctgaactggtatcagcagcggagaggcaaggcccctaagctgctgatctacgacggctccaagctggaaagaggcgtgccctccagattctccggcagaagatggggccaagagtacaacctgaccatcaacaacctgcagcctgaggatatcgccacatacttttgccaggtgtacgagttcgtggtgcccggcacaagactggacctgaagagaacagtggccgctccttccgtgttcatcttcccaccttccgacgagcagctgaagtctggcacagcctctgtcgtgtgcctgctgaacaacttctaccctcgggaagccaaggtgcagtggaaggtggacaatgccctgcagtccggcaactcccaagagtctgtgaccgagcaggactccaaggacagcacctacagcctgtcctccacactgaccctgtccaaggccgactacgagaagcacaaggtgtacgcctgcgaagtgacccatcagggcctgtctagccctgtgaccaagtctttcaaccggggcgagtgt

SEQ ID NO: 1016 - DNA, 1458 bp, synthetic construct
  misc_feature 1..1458: note = Description of Artificial Sequence: Synthetic polynucleotide
  source 1..1458: mol_type = other DNA
gaggtgcagctggtggaatctggcggaggattggttcagcctggcggctctctgagactgtcttgtgccgcttctggcttcaccttcaacacctacgccatgaactgggtccgacaggctcctggcaaaggcctggaatgggtcggacggatccggtccaagtacaacaattacgccacctactacgccgactccgtgaagggcagattcaccatctctcgggacgactccaagaactccctgtacctgcagatgaacagcctgcggaccgaggataccgccgtgtactattgtgtgcggcacggcaacttcggccactcctatgtgtcttggtttgcctactggggccagggcacactggtcacagtttcttccggcggaggtggaagcggaggcggaggtagtggcggtggtggttcaggtggtggtggatctcaggctgtggttacccaggagcctagcctgacagtttctcctggcggcaccgtgacactgacctgtggatcttctaccggcgctgtgaccaccggccattacgctaattgggtgcagcagaagcctggacaggccccaagaggactgatcggcggcacatctaacagagcccctggcgtcccagccagattctctggatctctgcttggcggcaaggccgctctgacaatttctggtgctcagcctgaggacgaggccgagtactactgtgccctgtggtactccaacagatgggtgttcggcggaggcaccaagctgacagtgttggagcccaaatcttcagacaagacccacacctgtcctccatgtcctgctccagaagctgctggcggcccttccgtgtttctgttccctccaaagcctaaggacaccctgatgatcagcagaacccctgaagtgacctgcgtggtggtggatgtgtcccacgaggatcccgaagtgaagttcaattggtacgtggacggcgtggaagtgcacaacgccaagaccaagcctagagaggaacagtacaacagcacctacagagtggtgtccgtgctgaccgtgctgcaccaggattggctgaacggcaaagagtacaagtgcaaggtgtccaacaaggccctgcctgccagcatcgagaaaaccatcagcaaggccaagggccagcctagggaaccccaggtttacaccctgcctccaagccgggaagagatgaccaagaaccaggtgtccctgtggtgcctggtcaagggcttctacccttccgatatcgccgtggaatgggagagcaatggccagcctgagaacaactacaagacaacccctcctgtgctggacagcgacggctcattcttcctgtacagcaagctgacagtggacaagagcagatggcagcagggcaacgtgttcagctgcagcgtgatgcacgaggccctgcacaaccactacacccagaagtccctgagcctgtctcctggcaaa

SEQ ID NO: 1017 - DNA, 1359 bp, synthetic construct
  misc_feature 1..1359: note = Description of Artificial Sequence: Synthetic polynucleotide
  source 1..1359: mol_type = other DNA
caggtgcagctgctgcagtctggcgccgctgtgacaaaaccaggcgcttctgtgcgggtgtcctgcgaggccagcggctacaacatccgggactacttcattcactggtggcgccaggcccctggacagggactgcagtgggtgggatggatcaaccccaagaccggccagcccaacaaccccagacagttccagggcagagtgtccctgaccagacacgccagcttcgacttcgacaccttcagcttctacatggacctgaaggccctgcggagcgacgataccgccgtgtacttctgcgccagacagagaagcgactactgggatttcgacgtgtggggcagcggcacccaagtgaccgtgtcatctgcctctacaaagggccctagtgtgttccctctggctcccagcagcaagtctacatctggcggaacagccgctctgggctgcctggtcaaggattactttcccgagcctgtgaccgtgtcctggaattctggcgctctgacaagcggcgtgcacacctttccagctgtgctgcaaagcagcggcctgtactctctgagcagcgtggtcacagtgcctagctctagcctgggcacccagacctacatctgcaatgtgaaccacaagcctagcaacaccaaggtggacaagaaggtggaacccaagagctgcgacaagacccacacctgtcctccatgtcctgctccagaagctgctggcggcccttccgtgtttctgttccctccaaagcctaaggacaccctgatgatcagcagaacccctgaagtgacctgcgtggtggtggatgtgtcccacgaggatcccgaagtgaagttcaattggtacgtggacggcgtggaagtgcacaacgccaagaccaagcctagagaggaacagtacaacagcacctacagagtggtgtccgtgctgaccgtgctgcaccaggattggctgaacggcaaagagtacaagtgcaaggtgtccaacaaggccctgcctgccagcatcgagaaaaccatcagcaaggccaagggccagcctagggaaccccaggtttacacactgcctccaagccgggaagagatgaccaagaaccaggtgtccctgagctgtgccgtgaagggcttctacccttccgatatcgccgtggaatgggagagcaatggccagcctgagaacaactacaagacaacccctcctgtgctggacagcgacggctcattcttcctggtgtccaagctgacagtggacaagtccagatggcagcagggcaacgtgttcagctgcagcgtgatgcacgaggccctgcacaaccactacacccagaagtccctgtctctgagccccggcaaa

SEQ ID NO: 1018 - DNA, 1458 bp, synthetic construct
  misc_feature 1..1458: note = Description of Artificial Sequence: Synthetic polynucleotide
  source 1..1458: mol_type = other DNA
gaggtgcagctggtggaatctggcggaggattggttcagcctggcggctctctgagactgtcttgtgccgcttctggcttcaccttcaacacctacgccatgaactgggtccgacaggctcctggcaaaggcctggaatgggtcggacggatccggtccaagtacaacaattacgccacctactacgccgactccgtgaagagcagattcaccatctctcgggacgactccaagaactccctgtacctggagatgaacagcctgcggaccgaggataccgccgtgtactattgtgtgcggcacggcaacttcggccactcctatgtgtcttggtttgcctactggggccagggcacactggtcacagtttcttccggcggaggtggaagcggaggcggaggtagtggcggtggtggttcaggtggtggtggatctcaggctgtggttacccaggagcctagcctgacagtttctcctggcggcaccgtgacactgacctgtggatcttctaccggcgctgtgaccaccggccattacgctaattgggtgcagcagaagcctggacaggccccaagaggactgatcggcggcacatctaacagagcccctggcgtcccagccagattctctggatctctgcttggcggcaaggccgctctgacaatttctggtgctcagcctgaggacgaggccgagtactactgtgccctgtggtactccaacagatgggtgttcggcggaggcaccaagctgacagtgttggagcccaaatcttcagacaagacccacacctgtcctccatgtcctgctccagaagctgctggcggcccttccgtgtttctgttccctccaaagcctaaggacaccctgatgatcagcagaacccctgaagtgacctgcgtggtggtggatgtgtcccacgaggatcccgaagtgaagttcaattggtacgtggacggcgtggaagtgcacaacgccaagaccaagcctagagaggaacagtacaacagcacctacagagtggtgtccgtgctgaccgtgctgcaccaggattggctgaacggcaaagagtacaagtgcaaggtgtccaacaaggccctgcctgccagcatcgagaaaaccatcagcaaggccaagggccagcctagggaaccccaggtttacacactgcctccaagccgggaagagatgaccaagaaccaggtgtccctgagctgtgccgtgaagggcttctacccttccgatatcgccgtggaatgggagagcaatggccagcctgagaacaactacaagacaacccctcctgtgctggacagcgacggctcattcttcctggtgtccaagctgacagtggacaagtccagatggcagcagggcaacgtgttcagctgcagcgtgatgcacgaggccctgcacaaccggtacacccagaagtccctgtctctgagccccggcaaa

SEQ ID NO: 1019 - DNA, 1359 bp, synthetic construct
  misc_feature 1..1359: note = Description of Artificial Sequence: Synthetic polynucleotide
  source 1..1359: mol_type = other DNA
caggtgcagctgctgcagtctggcgccgctgtgacaaaaccaggcgcttctgtgcgggtgtcctgcgaggccagcggctacaacatccgggactacttcattcactggtggcgccaggcccctggacagggactgcagtgggtgggatggatcaaccccaagaccggccagcccaacaaccccagacagttccagggcagagtgtccctgaccagacacgccagcttcgacttcgacaccttcagcttctacatggacctgaaggccctgcggagcgacgataccgccgtgtacttctgcgccagacagagaagcgactactgggatttcgacgtgtggggcagcggcacccaagtgaccgtgtcatctgctagcaccaagggcccctccgtgtttccactggctcctagcagcaagagcacaagcggaggaacagccgctctgggctgtctggtcaaggactactttcccgagcctgtgaccgtgtcctggaattctggcgctctgacaagcggcgtgcacacctttccagctgtgctgcaaagcagcggcctgtactctctgagcagcgtggtcacagtgccaagctctagcctgggcacccagacctacatctgcaatgtgaaccacaagcctagcaacaccaaggtggacaagaaggtggaacccaagagctgcgacaagacccacacctgtcctccatgtcctgctccagaagctgctggcggcccttctgtgttcctgtttcctccaaagcctaaggacaccctgtacatcacccgcgagcctgaagtgacctgtgtggtggtggatgtgtcccacgaggaccccgaagtgaagttcaattggtacgtggacggcgtggaagtgcacaacgccaagaccaagcctagagaggaacagtacaacagcacctacagagtggtgtccgtgctgaccgtgctgcaccaggattggctgaacggcaaagagtacaagtgcaaggtgtccaacaaggccctgcctgccagcatcgagaaaaccatcagcaaggccaagggccagcctagggaaccccaggtttacacactgcctccaagccgggaagagatgaccaagaaccaggtgtccctgtggtgcctcgtgaagggcttctacccttccgatatcgccgtggaatgggagagcaatggccagcctgagaacaactacaagacaacccctcctgtgctggacagcgacggctcattcttcctgtacagcaagctgacagtggacaagtccagatggcagcagggcaacgtgttcagctgcagcgtgatgcacgaggccctgcacaaccactacacccagaagtccctgagcctgtctcctggcaaa

SEQ ID NO: 1020 - DNA, 1359 bp, synthetic construct
  misc_feature 1..1359: note = Description of Artificial Sequence: Synthetic polynucleotide
  source 1..1359: mol_type = other DNA
caggtgcagctgctgcagtctggcgccgctgtgacaaaaccaggcgcttctgtgcgggtgtcctgcgaggccagcggctacaacatccgggactacttcattcactggtggcgccaggcccctggacagggactgcagtgggtgggatggatcaaccccaagaccggccagcccaacaaccccagacagttccagggcagagtgtccctgaccagacacgccagcttcgacttcgacaccttcagcttctacatggacctgaaggccctgcggagcgacgataccgccgtgtacttctgcgccagacagagaagcgactactgggatttcgacgtgtggggcagcggcacccaagtgaccgtgtcatctgctagcaccaagggcccctccgtgtttccactggctcctagcagcaagagcacaagcggaggaacagccgctctgggctgtctggtcaaggactactttcccgagcctgtgaccgtgtcctggaattctggcgctctgacaagcggcgtgcacacctttccagctgtgctgcaaagcagcggcctgtactctctgagcagcgtggtcacagtgccaagctctagcctgggcacccagacctacatctgcaatgtgaaccacaagcctagcaacaccaaggtggacaagaaggtggaacccaagagctgcgacaagacccacacctgtcctccatgtcctgctccagaagctgctggcggcccttctgtgttcctgtttcctccaaagcctaaggacaccctgatgatcagcagaacccctgaagtgacctgcgtggtggtggatgtgtcccacgaggatcccgaagtgaagttcaattggtacgtggacggcgtggaagtgcacaacgccaagaccaagcctagagaggaacagtacaacagcacctacagagtggtgtccgtgctgaccgtgctgcaccaggattggctgaacggcaaagagtacaagtgcaaggtgtccaacaaggccctgcctgccagcatcgagaaaaccatcagcaaggccaagggccagcctagggaaccccaggtttacacactgcctccaagccgggaagagatgaccaagaaccaggtgtccctgtggtgcctcgtgaagggcttctacccttccgatatcgccgtggaatgggagagcaatggccagcctgagaacaactacaagacaacccctcctgtgctggacagcgacggctcattcttcctgtacagcaagctgacagtggacaagtccagatggcagcagggcaacgtgttcagctgcagcgtgatgcacgaggccctgcacaaccactacacccagaagtccctgagcctgtctcctggcaaa

SEQ ID NO: 1021 - DNA, 1458 bp, synthetic construct
  misc_feature 1..1458: note = Description of Artificial Sequence: Synthetic polynucleotide
  source 1..1458: mol_type = other DNA
gaggtgcagctggtggaatctggcggaggattggttcagcctggcggctctctgagactgtcttgtgccgcttctggcttcaccttcaacacctacgccatgaactgggtccgacaggctcctggcaaaggcctggaatgggtcggacggatccggtccaagtacaacaattacgccacctactacgccgactccgtgaagggcagattcaccatctctcgggacgactccaagaactccctgtacctgcagatgaacagcctgcggaccgaggataccgccgtgtactattgtgtgcggcacggcaacttcggccactcctatgtgtcttggtttgcctactggggccagggcacactggtcacagtttcttccggcggaggtggaagcggaggcggaggtagtggcggtggtggttcaggtggtggtggatctcaggctgtggttacccaggagcctagcctgacagtttctcctggcggcaccgtgacactgacctgtggatcttctaccggcgctgtgaccaccggccattacgctaattgggtgcagcagaagcctggacaggccccaagaggactgatcggcggcacatctaacagagcccctggcgtcccagccagattctctggatctctgcttggcggcaaggccgctctgacaatttctggtgctcagcctgaggacgaggccgagtactactgtgccctgtggtactccaacagatgggtgttcggcggaggcaccaagctgacagtgttggagcccaaatcttcagacaagacccacacctgtcctccatgtcctgctccagaagctgctggcggcccttccgtgtttctgttccctccaaagcctaaggacaccctgatgatcagcagaacccctgaagtgacctgcgtggtggtggatgtgtcccacgaggatcccgaagtgaagttcaattggtacgtggacggcgtggaagtgcacaacgccaagaccaagcctagagaggaacagtacaacagcacctacagagtggtgtccgtgctgaccgtgctgcaccaggattggctgaacggcaaagagtacaagtgcaaggtgtccaacaaggccctgcctgccagcatcgagaaaaccatcagcaaggccaagggccagcctagggaaccccaggtttacacactgcctccaagccgggaagagatgaccaagaaccaggtgtccctgagctgtgccgtgaagggcttctacccttccgatatcgccgtggaatgggagagcaatggccagcctgagaacaactacaagacaacccctcctgtgctggacagcgacggctcattcttcctggtgtccaagctgacagtggacaagtccagatggcagcagggcaacgtgttcagctgcagcgtgatgcacgaggccctgcacaaccggtacacccagaagtccctgtctctgagccccggcaaa

SEQ ID NO: 1022 - DNA, 1386 bp, synthetic construct
  misc_feature 1..1386: note = Description of Artificial Sequence: Synthetic polynucleotide
  source 1..1386: mol_type = other DNA
cagatgcagctgcaggaatctggccctggcctcgtgaagccctccgagacactgtccctgacctgctctgtgtccggcgcctccatctccgactcctactggtcttggatccggcgatcccctggcaagggcctggaatggatcggctacgtgcacaagtccggcgacaccaactacaatcccagcctgaagtccagagtgcacctgtccctggacacctccaagaaccaggtgtccctgtctctgactggtgtcaccgctgctgactccggcaagtactactgcgccagaaccctgcacggcagacggatctacggcatcgtggccttcaacgagtggttcacctacttctacatggacgtgtggggcaccggcacccaagtgaccgtgtcctctgcctctacaaagggccctagtgtgttccctctggctcccagcagcaagtctacatctggcggaacagccgctctgggctgcctggtcaaggattactttcccgagcctgtgaccgtgtcctggaattctggcgctctgacaagcggcgtgcacacctttccagctgtgctgcaaagcagcggcctgtactctctgagcagcgtggtcacagtgcctagctctagcctgggcacccagacctacatctgcaatgtgaaccacaagcctagcaacaccaaggtggacaagaaggtggaacccaagagctgcgacaagacccacacctgtcctccatgtcctgctccagaagctgctggcggcccttccgtgtttctgttccctccaaagcctaaggacaccctgatgatcagcagaacccctgaagtgacctgcgtggtggtggatgtgtcccacgaggatcccgaagtgaagttcaattggtacgtggacggcgtggaagtgcacaacgccaagaccaagcctagagaggaacagtacaacagcacctacagagtggtgtccgtgctgaccgtgctgcaccaggattggctgaacggcaaagagtacaagtgcaaggtgtccaacaaggccctgcctgccagcatcgagaaaaccatcagcaaggccaagggccagcctagggaaccccaggtttacacactgcctccaagccgggaagagatgaccaagaaccaggtgtccctgtggtgtctggtgaagggcttctacccttccgatatcgccgtggaatgggagagcaatggccagcctgagaacaactacaagacaacccctcctgtgctggacagcgacggctcattcttcctgtactccaagctgacagtggacaagtccagatggcagcagggcaacgtgttcagctgcagcgtgatgcacgaggccctgcacaaccactacacccagaagtccctgtctctgagccccggcaaa

SEQ ID NO: 1023 - DNA, 633 bp, synthetic construct
  misc_feature 1..633: note = Description of Artificial Sequence: Synthetic polynucleotide
  source 1..633: mol_type = other DNA
agcgacatcagcgtggccccaggcgagaccgccaggatcagctgcggcgagaagagcctgggcagcagggccgtgcaatggtatcagcacagggcaggccaggcccccagcctgatcatctacaacaaccaggacaggcccagcggcatccccgagaggttcagtggcagccccgacttcaggcccggtaccacagccaccctgaccatcacctcagtggaggccggtgacgaggccgactactactgccatatctgggacagcagagttcccaccaagtgggtctttggaggcggaaccaccttgaccgtgctgggacagcctaaggccgctccttccgtgaccctgttccctccatcctccgaggaactgcaggccaacaaggccaccctcgtgtgcctgatctccgacttctaccctggcgccgtgaccgtggcctggaaggctgatagctctcctgtgaaggccggcgtggaaaccaccaccccttccaagcagtccaacaacaaatacgccgcctcctcctacctgtccctgacccctgagcagtggaagtcccaccggtcctacagctgccaagtgacccacgagggctccaccgtggaaaagaccgtggctcctaccgagtgctcc

SEQ ID NO: 1024 - DNA, 1458 bp, synthetic construct; identical to SEQ ID NO: 1018
  misc_feature 1..1458: note = Description of Artificial Sequence: Synthetic polynucleotide
  source 1..1458: mol_type = other DNA

SEQ ID NO: 1025 - DNA, 1386 bp, synthetic construct; identical to SEQ ID NO: 1022
  misc_feature 1..1386: note = Description of Artificial Sequence: Synthetic polynucleotide
  source 1..1386: mol_type = other DNA

SEQ ID NO: 1026 - protein, 17 aa, unidentified
  REGION 1..17: note = Description of Unknown: serum albumin sequence
KWVTFISLLFLFSSAYS

SEQ ID NO: 1027 - protein, 20 aa, unidentified
  REGION 1..20: note = Description of Unknown: IL-2 sequence
MYRMQLLSCIALSLALVTNS

SEQ ID NO: 1028 - protein, 21 aa, unidentified
  REGION 1..21: note = Description of Unknown: SPOCK1 sequence
MPAIAVLAAAAAAWCFLQVES

SEQ ID NO: 1029 - protein, 22 aa, unidentified
  REGION 1..22: note = Description of Unknown: SPOCK2 sequence
MRAPGCGRLVLPLLLLAAAALA

SEQ ID NO: 1030 - protein, 17 aa, unidentified
  REGION 1..17: note = Description of Unknown: Ig Kappa sequence
METDTLLLWVLLLWVPG

SEQ ID NO: 1031 - protein, 18 aa, unidentified
  REGION 1..18: note = Description of Unknown: CSF2, GM-CSF sequence
MWLQSLLLLGTVACSISV

SEQ ID NO: 1032 - protein, 23 aa, unidentified
  REGION 1..23: note = Description of Unknown: PLAT, t-PA sequence
MDAMKRGLCCVLLLCGAVFVSAR

SEQ ID NO: 1033 - protein, 16 aa, unidentified
  REGION 1..16: note = Description of Unknown: CD74 sequence
MHRRRSRSCREDQKPV

SEQ ID NO: 1034 - protein, 31 aa, unidentified
  REGION 1..31: note = Description of Unknown: beta-catenin sequence
MRKAAVSHWQQQSYLDSGIHSGATTTAPSLS

SEQ ID NO: 1035 - protein, 107 aa, unidentified
  REGION 1..107: note = Description of Unknown: CCL7, MCP-3 sequence
MNPSAAVIFCLILLGLSGTQGILDMAQPVGINTSTTCCYRFINKKIPKQRLESYRRTTSSHCPREAVIFKTKLDKEICADPTQKWVQDFMKHLDKKTQTPKLASAGA

SEQ ID NO: 1036 - protein, 76 aa, unidentified [sequence omitted]

SEQ ID NO: 1037 - protein, 17 aa, unidentified
  REGION 1..17: note = Description of Unknown: calreticulin sequence
MLLSVPLLLGLLGLAVA

SEQ ID NO: 1038 - protein, 16 aa, Vesicular stomatitis virus
MKCLLYLAFLFIGVNC

SEQ ID NO: 1039 - protein, 21 aa, unidentified
  REGION 1..21: note = Description of Unknown: CXCL10, IP-10 sequence
MNQTAILICCLIFLTLSGIQG

SEQ ID NO: 1040 - protein, 4 aa, synthetic construct
  REGION 1..4: note = Description of Artificial Sequence: Synthetic peptide
FDFD

SEQ ID NO: 1041 - protein, 8 aa, synthetic construct
  REGION 1..8: note = Description of Artificial Sequence: Synthetic 8xHis tag
HHHHHHHH

SEQ ID NO: 1042 - protein, 4 aa, synthetic construct
  REGION 1..4: note = Description of Artificial Sequence: Synthetic peptide
WDFD

SEQ ID NO: 1043 - protein, 486 aa, synthetic construct; identical to SEQ ID NO: 779
  REGION 1..486: note = Description of Artificial Sequence: Synthetic polypeptide

SEQ ID NO: 1044 - protein, 125 aa, synthetic construct; identical to SEQ ID NO: 713
  REGION 1..125: note = Description of Artificial Sequence: Synthetic polypeptide

SEQ ID NO: 1045 - protein, 125 aa, synthetic construct
  REGION 1..125: note = Description of Artificial Sequence: Synthetic polypeptide
EVQLVESGGGLVQPGGSLRLSCAASGFTFSTYAMNWVRQAPGKGLEWVGRIRSKYNNYATYYADSVKDRFTISRDDSKNSLYLQMNSLKTEDTAVYYCVRHGNFGNSYVSWFAYWGQGTLVTVSS

SEQ ID NO: 1046 - protein, 125 aa, synthetic construct
  REGION 1..125: note = Description of Artificial Sequence: Synthetic polypeptide
EVKLVESGGGLVQPGGSLRLSCAASGFTFNTYALNWVRQAPGKGLEWVARIRSKYNNYATYYADSVKDRFTISRDDSKSSLYLQMNNLKTEDTAVYYCVRHGNFGNSYVSWFAYWGQGTLVTVSS

SEQ ID NO: 1047 - protein, 125 aa, synthetic construct
  REGION 1..125: note = Description of Artificial Sequence: Synthetic polypeptide
EVQLVESGGGLVQPGGSLRLSCAASGFTFNTYAMNWVRQAPGKGLEWVARIRSKYNNYATYYAASVKGRFTISRDDSKNSLYLQMNSLKTEDTAVYYCARHGNFGNSYVSWFAYWGQGTLVTVSS

SEQ ID NO: 1048 - protein, 125 aa, synthetic construct
  REGION 1..125: note = Description of Artificial Sequence: Synthetic polypeptide
EVQLLESGGGLVQPGGSLRLSCAASGFTFSTYAMNWVRQAPGKGLEWVSRIRSKYNNYATYYADSVKGRFTISRDDSKNTLYLQMNSLRAEDTAVYYCVRHGNFGNSYVSWFAYWGQGTLVTVSS

SEQ ID NO: 1049 - protein, 125 aa, synthetic construct
  REGION 1..125: note = Description of Artificial Sequence: Synthetic polypeptide
EVQLVESGGGLVQPGGSLRLSCAASGFTFSTYAMNWVRQAPGKGLEWVGRIRSKYNNYATYYADSVKGRFTISRDDSKNTLYLQMNSLRAEDTAVYYCVRHGNFGDSYVSWFAYWGQGTLVTVSS

SEQ ID NO: 1050 - protein, 109 aa, synthetic construct
  REGION 1..109: note = Description of Artificial Sequence: Synthetic polypeptide
QAVVTQESALTTSPGETVTLTCRSSTGAVTTSNYANWVQEKPDHLFTGLIGGTNKRAPGVPARFSGSLIGDKAALTITGAQTEDEAIYFCALWYSNLWVFGGGTKLTVL

SEQ ID NO: 1051 - protein, 109 aa, synthetic construct
  REGION 1..109: note = Description of Artificial Sequence: Synthetic polypeptide
QAVVTQEPSLTVSPGGTVTLTCRSSTGAVTTSNYANWVQQKPGQAPRGLIGGTNKRAPWTPARFSGSLLGGKAALTITGAQAEDEADYYCALWYSNLWVFGGGTKLTVL

SEQ ID NO: 1052 - protein, 109 aa, synthetic construct
  REGION 1..109: note = Description of Artificial Sequence: Synthetic polypeptide
QAVVTQEPSFSVSPGGTVTLTCRSSTGAVTTSNYANWVQQTPGQAFRGLIGGTNKRAPGVPARFSGSLIGDKAALTITGAQADDESIYFCALWYSNLWVFGGGTKLTVL

SEQ ID NO: 1053 - protein, 109 aa, synthetic construct
  REGION 1..109: note = Description of Artificial Sequence: Synthetic polypeptide
QTVVTQEPSLTVSPGGTVTLTCRSSTGAVTTSNYANWVQQKPGQAPRGLIGGTNKRAPGTPARFSGSLLGGKAALTLSGVQPEDEAEYYCALWYSNLWVFGGGTKLTVL

SEQ ID NO: 1054 - protein, 109 aa, synthetic construct
  REGION 1..109: note = Description of Artificial Sequence: Synthetic polypeptide
QAVVTQEPSLTVSPGGTVTLTCGSSTGAVTTSNYANWVQEKPGQAFRGLIGGTNKRAPGTPARFSGSLLGGKAALTLSGAQPEDEAEYYCALWYSNLWVFGGGTKLTVL

SEQ ID NO: 1055 - protein, 109 aa, synthetic construct
  REGION 1..109: note = Description of Artificial Sequence: Synthetic polypeptide
QAVVTQEPSLTVSPGGTVTLTCGSSTGAVTTSNYANWVQQKPGKSPRGLIGGTNKRAPGVPARFSGSLLGGKAALTISGAQPEDEADYYCALWYSNHWVFGGGTKLTVL

SEQ ID NO: 1056 - protein, 109 aa, synthetic construct; identical to SEQ ID NO: 1050
  REGION 1..109: note = Description of Artificial Sequence: Synthetic polypeptide

SEQ ID NO: 1057 - protein, 109 aa, Homo sapiens
QAVVTQEPSLTVSPGGTVTLTCGSSTGAVTSGHYPYWFQQKPGQAPRTLIYDTSNKHSWTPARFSGSLLGGKAALTLSGAQPEDEAEYYCLLSYSARWVFGGGTKLTVL

SEQ ID NO: 1058 - protein, 109 aa, synthetic construct; identical to SEQ ID NO: 723
  REGION 1..109: note = Description of Artificial Sequence: Synthetic polypeptide

SEQ ID NO: 1059 - protein, 109 aa, synthetic construct; identical to SEQ ID NO: 724
  REGION 1..109: note = Description of Artificial Sequence: Synthetic polypeptide

SEQ ID NO: 1060 - protein, 109 aa, synthetic construct; identical to SEQ ID NO: 57
  REGION 1..109: note = Description of Artificial Sequence: Synthetic polypeptide

SEQ ID NO: 1061 - protein, 109 aa, synthetic construct; identical to SEQ ID NO: 725
  REGION 1..109: note = Description of Artificial Sequence: Synthetic polypeptide

SEQ ID NO: 1062 - protein, 109 aa, synthetic construct; identical to SEQ ID NO: 726
  REGION 1..109: note = Description of Artificial Sequence: Synthetic polypeptide

SEQ ID NO: 1063 - protein, 109 aa, synthetic construct; identical to SEQ ID NO: 727
  REGION 1..109: note = Description of Artificial Sequence: Synthetic polypeptide

SEQ ID NO: 1064 - protein, 125 aa, synthetic construct; identical to SEQ ID NO: 713
  REGION 1..125: note = Description of Artificial Sequence: Synthetic polypeptide

SEQ ID NO: 1065 - protein, 116 aa, Homo sapiens
EVQLVESGGGLVQPGGSLRLSCAASGFTFSDHYMDWVRQAPGKGLEWVGRTRNKANSYTTEYAASVKGRFTISRDDSKNSLYLQMNSLKTEDTAVYYCARYYFDYWGQGTLVTVSS

SEQ ID NO: 1066 - protein, 125 aa, synthetic construct; identical to SEQ ID NO: 53
  REGION 1..125: note = Description of Artificial Sequence: Synthetic polypeptide

SEQ ID NO: 1067 - protein, 125 aa, synthetic construct; identical to SEQ ID NO: 715
  REGION 1..125: note = Description of Artificial Sequence: Synthetic polypeptide

SEQ ID NO: 1068 - protein, 125 aa, synthetic construct; identical to SEQ ID NO: 50
  REGION 1..125: note = Description of Artificial Sequence: Synthetic polypeptide

SEQ ID NO: 1069 - protein, 125 aa, synthetic construct; identical to SEQ ID NO: 716
  REGION 1..125: note = Description of Artificial Sequence: Synthetic polypeptide

SEQ ID NO: 1070 - protein, 125 aa, synthetic construct; identical to SEQ ID NO: 717
  REGION 1..125: note = Description of Artificial Sequence: Synthetic polypeptide

SEQ ID NO: 1071 - protein, 125 aa, synthetic construct; identical to SEQ ID NO: 718
  REGION 1..125: note = Description of Artificial Sequence: Synthetic polypeptide

SEQ ID NO: 1072 - protein, 125 aa, synthetic construct; identical to SEQ ID NO: 719
  REGION 1..125: note = Description of Artificial Sequence: Synthetic polypeptide

SEQ ID NO: 1073 - protein, 125 aa, synthetic construct; identical to SEQ ID NO: 720
  REGION 1..125: note = Description of Artificial Sequence: Synthetic polypeptide

SEQ ID NO: 1074 - protein, 125 aa, synthetic construct; identical to SEQ ID NO: 721
  REGION 1..125: note = Description of Artificial Sequence: Synthetic polypeptide

SEQ ID NO: 1075 - protein, 125 aa, synthetic construct; identical to SEQ ID NO: 722
  REGION 1..125: note = Description of Artificial Sequence: Synthetic polypeptide

SEQ ID NO: 1076 - protein, 109 aa, synthetic construct; identical to SEQ ID NO: 1050
  REGION 1..109: note = Description of Artificial Sequence: Synthetic polypeptide

SEQ ID NO: 1077 - protein, 109 aa, Homo sapiens; identical to SEQ ID NO: 1057

SEQ ID NO: 1078 - protein, 109 aa, synthetic construct; identical to SEQ ID NO: 731
  REGION 1..109: note = Description of Artificial Sequence: Synthetic polypeptide

SEQ ID NO: 1079 - protein, 109 aa, synthetic construct; identical to SEQ ID NO: 58
  REGION 1..109: note = Description of Artificial Sequence: Synthetic polypeptide

SEQ ID NO: 1080 - protein, 109 aa, synthetic construct; identical to SEQ ID NO: 732
  REGION 1..109: note = Description of Artificial Sequence: Synthetic polypeptide

SEQ ID NO: 1081 - protein, 109 aa, synthetic construct; identical to SEQ ID NO: 733
  REGION 1..109: note = Description of Artificial Sequence: Synthetic polypeptide

SEQ ID NO: 1082 - protein, 125 aa, synthetic construct; identical to SEQ ID NO: 713
  REGION 1..125: note = Description of Artificial Sequence: Synthetic polypeptide

SEQ ID NO: 1083 - protein, 116 aa, Homo sapiens; identical to SEQ ID NO: 1065

SEQ ID NO: 1084 - protein, 125 aa, synthetic construct; identical to SEQ ID NO: 50
  REGION 1..125: note = Description of Artificial Sequence: Synthetic polypeptide

SEQ ID NO: 1085 - protein, 125 aa, synthetic construct; identical to SEQ ID NO: 728
  REGION 1..125: note = Description of Artificial Sequence: Synthetic polypeptide

SEQ ID NO: 1086 - protein, 125 aa, synthetic construct; identical to SEQ ID NO: 729
  REGION 1..125: note = Description of Artificial Sequence: Synthetic polypeptide

SEQ ID NO: 1087 - protein, 125 aa, synthetic construct; identical to SEQ ID NO: 730
  REGION 1..125: note = Description of Artificial Sequence: Synthetic polypeptide

SEQ ID NO: 1088 - protein, 5 aa, synthetic construct
  REGION 1..5: note = Description of Artificial Sequence: Synthetic peptide
GGGGS

SEQ ID NO: 1089 - protein, 330 aa, Homo sapiens
ASTKGPSVFPLAPSSKSTSGGTAALGCLVKDYFPEPVTVSWNSGALTSGVHTFPAVLQSSGLYSLSSVVTVPSSSLGTQTYICNVNHKPSNTKVDKRVEPKSCDKTHTCPPCPAPELLGGPSVFLFPPKPKDTLMISRTPEVTCVVVDVSHEDPEVKFNWYVDGVEVHNAKTKPREEQYNSTYRVVSVLTVLHQDWLNGKEYKCKVSNKALPAPIEKTISKAKGQPREPQVYTLPPSREEMTKNQVSLTCLVKGFYPSDIAVEWESNGQPENNYKTTPPVLDSDGSFFLYSKLTVDKSRWQQGNVFSCSVMHEALHNHYTQKSLSLSPGK

SEQ ID NO: 1090 - protein, 12 aa, synthetic construct
  REGION 1..12: note = Description of Artificial Sequence: Synthetic peptide
VSGDSTAGCDYF

SEQ ID NO: 1091 - protein, 8 aa, synthetic construct
  REGION 1..8: note = Description of Artificial Sequence: Synthetic peptide
ASQSVKNN

SEQ ID NO: 1092 - protein, 9 aa, synthetic construct
  REGION 1..9: note = Description of Artificial Sequence: Synthetic peptide
QRSDFWDFD

SEQ ID NO: 1093 - DNA, 1365 bp, synthetic construct
  source 1..1365: mol_type = other DNA
gaggtgcagctggtggaatctggcggaggattggttcagcctggcggctctctgagactgtcttgtgccgcttctggcttcaccttcaacacctacgctatgaactgggtccgacaggcccctggcaaaggactggaatgggtcggacggatccggtccaagtacaacaactacgccacctactacgccgactccgtgaagggcagattcaccatctctcgggacgactccaagaactccctgtacctgcagatgaacagcctgcggaccgaggataccgccgtgtactattgtgtgcggcacggcaacttcggccactcctatgtgtcttggtttgcctactggggccagggcacactggtcacagtttcttccgcctccaccaagggacccagcgttttccctctggctccatcctccaagtctacctctggcggaacagctgctctgggctgcctggtcaaggactactttcctgagcctgtgaccgtgtcctggaactctggcgctctgacatctggcgtgcacacctttccagctgtgctgcagtcctccggcctgtactctctgtcctctgtcgtgaccgtgccttccagctctctgggaacccagacctacatctgcaatgtgaaccacaagccttccaacaccaaggtggacaagaaggtggaacccaagtcctgcgacaagacccacacctgtcctccatgtcctgctccagaagctgctggcggcccttccgtgtttctgttccctccaaagcctaaggacaccctgtacatcacccgcgagcctgaagtgacctgcgtggtggtggatgtgtctcacgaggaccccgaagtgaagttcaattggtacgtggacggcgtggaagtgcacaacgccaagaccaagcctagagaggaacagtacaactccacctacagagtggtgtccgtgctgaccgtgctgcaccaggattggctgaacggcaaagagtacaagtgcaaggtgtccaacaaggccctgcctgcctccatcgaaaagaccatctccaaggccaagggccagcctagggaaccccaggtttacaccctgccacctagccgggaagagatgaccaagaaccaggtgtccctgtggtgcctggttaagggcttctacccctccgatatcgccgtggaatgggagtctaatggccagcctgagaacaactacaagacaacccctcctgtgctggactccgacggctcattcttcctgtactccaagctgacagtggacaagtccagatggcagcagggcaacgtgttctcctgctccgtgatgcacgaggccctgcacaatcactacacccagaagtccctgtctctgagccctggcaag
